(19) United States
(12) Patent Application Publication
(10) Pub. No.: US 2023/0159603 A1
(43) Pub. Date: May 25, 2023

(54) MASKED IL-12 CYTOKINES AND THEIR CLEAVAGE PRODUCTS

(71) Applicant: Xilio Development, Inc., Waltham, MA (US)

(72) Inventors: Raphael ROZENFELD, Waltham, MA (US); Ugur ESKIOCAK, Waltham, MA (US); Huawei QIU, Waltham, MA (US); Parker JOHNSON, Waltham, MA (US); Kurt Allen JENKINS, Waltham, MA (US); Magali PEDERZOLI-RIBEIL, Waltham, MA (US); Dheeraj Singh TOMAR, Waltham, MA (US); Rebekah Kay O'DONNELL, Waltham, MA (US)

(21) Appl. No.: 17/995,162

(22) PCT Filed: Mar. 31, 2021
(86) PCT No.: PCT/US2021/025107

§ 371 Date: Sep. 30, 2022

Related U.S. Application Data
(60) Provisional application No. 63/003,842, filed on Apr. 1, 2020.
(60) Provisional application No. 63/118,579, filed on Nov. 25, 2020.
(60) Provisional application No. 63/127,893, filed on Dec. 18, 2020.

(51) Int. Cl. C07K 14/54; C07K 14/715; A61P 35/00

(52) U.S. Cl. CPC C07K 14/5434; C07K 14/7155; A61P 35/00; C07K 2319/50; C07K 2319/30; A61K 38/00

(57) ABSTRACT

The present invention relates to masked IL-12 cytokines, comprising an IL-12 cytokine or functional fragment thereof, a masking moiety and a proteolytically cleavable linker. The masking moiety masks the IL-12 cytokine or functional fragment thereof thereby reducing or preventing binding of the IL-cytokine or functional fragment thereof to its cognate receptor, but upon proteolytic cleavage of the cleavable linker at a target site, the IL-12 cytokine or functional fragment thereof becomes activated, which renders it capable or more capable of binding to its cognate receptor.

### CROSS-REFERENCE TO RELATED APPLICATIONS

[0001] This application claims the priority benefit of U.S. Provisional Application Ser. Nos. 63/003,842, filed Apr. 1, 2020; 63/118,579, filed Nov. 25, 2020; and 63/127,893, filed Dec. 18, 2020; each of which is incorporated herein by reference in its entirety.

### SUBMISSION OF SEQUENCE LISTING ON ASCII TEXT FILE

[0002] The content of the following submission on ASCII text file is incorporated herein by reference in its entirety: a computer readable form (CRF) of the Sequence Listing (file name: 737762002840SEQLIST.TXT, date recorded: Mar. 26, 2021, size: 1,000 KB).

### FIELD

[0003] This invention relates to masked IL-12 cytokines and methods related to the use and manufacture of the same. This invention also relates to cleavage products of said masked IL-12 cytokines, and methods related to the use of the same.

### BACKGROUND

[0004] Cancer is the second leading cause of death in the United States, accounting for inure deaths than the next five leading causes (chronic respiratory,' disease, stroke, accidents. Alzheimer's disease and diabetes). While great strides have been made especially with targeted therapies, there remains a great deal of work to do in this space. Immunotherapy and a branch of this field, immuno-oncology, is creating viable and exciting therapeutic options for treating malignancies. Specifically, it is now recognized that one hallmark of cancer is immune evasion and significant efforts have identified targets and developed therapies to these targets to reactivate the immune system to recognize and treat cancer.

[0005] Cytokines can be classified in a variety of ways, such as based on their three-dimensional structure. Some cytokines are classified as being heterodimeric. Examples of heterodimeric cytokines include IL-12 and IL-23. IL-12 cytokine is a heterodimer comprising p35 and p40 sub-units.

[0006] Cytokine therapy is an effective strategy for stimulating the immune system to induce anti-tumor cytotoxicity. In particular, aldesleukin, a recombinant form of interleukin-2 (IL-2), has been approved by the FDA for the treatment of metastatic renal cell carcinoma and melanoma. Unfortunately, cytokines that are administered to patients generally have a very short half-life, thereby requiring frequent dosing. For instance, the product label of aldesleukin, marketed under the brand name Proleukin, states that the ding was shown to have a half-life of 85 minutes in patients who received a 5-minute intravenous (IV) infusion. IN addition, administration of high doses of cytokine can cause adverse health outcomes, such as vascular leakage, through systemic immune activation. These findings illustrate the need for developing IL-2 cytokine therapeutics that effectively target tumors without the side effects associated with systemic immune activation.

[0007] Provided herein are masked IL-12 cytokines, cleavage products of said masked IL-12 cytokines, and compositions thereof and methods of use thereof for addressing this need.

### SUMMARY

[0008] The disclosed invention relates to IL-12 cytokines or functional fragments thereof that are engineered to be masked by a masking moiety at one or more receptor binding site(s) of the IL-12 cytokine or functional fragment thereof. The IL-12 cytokines are engineered to be activatable by a protease at a target site, such as in a tumor microenvironment, by including a proteolytically cleavable linker. In the masked cytokine construct, the masking moiety reduces or prevents binding of the IL-12 cytokine or functional fragment thereof to its cognate receptor. Upon proteolytic cleavage of the cleavable linker at the target site, the IL-12 cytokine or functional fragment thereof becomes activated, which renders it capable or more capable of binding to its cognate receptor.

[0009] Provided herein is a masked IL-12 cytokine comprising a protein heterodimer comprising:
[0010] a first poly peptide chain comprising:

N′ HL1-L1-MM C′
[0011] and a second polypeptide chain comprising:

N′ HL2-L2-C C′
[0012] where HL1 is a first half life extension domain, L1 is a first linker, MM is a masking moiety, HL2 is a second half life extension domain, L2 is a second linker, and C is an IL-12 cytokine or functional fragment thereof,
[0013] wherein the first half-life extension domain is associated with the second half-life extension domain, and
[0014] wherein one of the first linker or the second linker comprises a proteolytically cleavable peptide.

[0015] In some embodiments, the IL-12 polypeptide or functional fragment thereof comprises an IL-12p40 polypeptide or functional fragment thereof covalently linked to an IL-12p35 polypeptide or functional fragment thereof.

[0016] In some embodiments, the IL-12p40-IL-12p35 linker is between 5 and 20 amino acids in length.

[0017] In some embodiments, the IL-12p40-IL-12p35 linker is rich in amino acid residues G and S.

[0018] In some embodiments, the IL-12p40-IL-12p35 linker comprises SEQ ID NO: 3.

[0019] In some embodiments, the IL-12p40 polypeptide comprises SEQ ID NO: 1 or an amino acid sequence having at least one amino acid modification as compared to the amino acid sequence of SEQ ID NO: 1.

[0020] In some embodiments, the IL-12p40 polypeptide comprises SEQ ID NO: 1.

[0021] In some embodiments, the IL-12p40 polypeptide comprises at least one amino acid modification to the GAG-binding domain (KSKREKKDRV) as compared to the amino acid sequence of SEQ ID NO: 1.

[0022] In some embodiments, the IL-12p40 polypeptide comprises SEQ ID NO: 57.

[0023] In some embodiments, the IL-12p40 polypeptide comprises SEQ ID NO: 58.

[0024] In some embodiments, the IL-12p40 polypeptide comprises an amino acid sequence having one or more cysteine substitution mutations as compared to the amino acid sequence of SEQ ID NO: 1.

[0025] In some embodiments, the IL-12p40 polypeptide comprises SEQ ID NO: 59.

[0026] In some embodiments, the IL-12p40 polypeptide comprises SEQ ID NO: 60.

[0027] In some embodiments, the IL-12p35 polypeptide comprises SEQ ID NO: 2 or an amino acid sequence having at least one amino acid modification as compared to the amino acid sequence of SEQ ID NO: 2.

[0028] In some embodiments, the IL-12p35 polypeptide comprises SEQ ID NO: 2.

[0029] In some embodiments, the IL-12 cytokine or functional fragment thereof comprises SEQ ID NO: 4.

[0030] In some embodiments, the IL-12 cytokine or functional fragment thereof comprises SEQ ID NO: 61.

[0031] In some embodiments, the IL-12 cytokine or functional fragment thereof comprises SEQ ID NO: 62.

[0032] In some embodiments, the IL-12 cytokine or functional fragment thereof comprises SEQ ID NO: 63.

[0033] In some embodiments, the IL-12 cytokine or functional fragment thereof comprises SEQ ID NO: 4.

[0034] In some embodiments, the masking moiety comprises an IL-12 cytokine receptor, or a subunit or functional fragment thereof.

[0035] In some embodiments, the masking moiety comprises the extracellular domain of human IL-12Rβ1 or a fragment, portion, or variant thereof that retains or otherwise demonstrates an affinity to IL-12.

[0036] In some embodiments, the masking moiety comprises residues 24 to 237 of human IL-12Rβ1, namely a sequence having SEQ ID NO: 5.

[0037] In some embodiments, the masking moiety comprises residues 24 to 545 of human IL-12Rβ1, namely a sequence having SEQ ID NO: 6.

[0038] In some embodiments, the masking moiety comprises the extracellular domain of human IL-12Rβ2 or a fragment, portion, or variant thereof that retains or otherwise demonstrates an affinity to IL-12.

[0039] In some embodiments, the masking moiety comprises residues 24 to 212 of human L-12Rβ2, namely a sequence having SEQ ID NO: 7.

[0040] In some embodiments, the masking moiety comprises residues 24 to 222 of human IL-12Rβ2, namely a sequence having SEQ ID NO: 8, or the masking moiety comprises residues 24 to 227 of human IL-12Rβ2, namely a sequence haying SEQ ID NO: 11.

[0041] In some embodiments, the masking moiety comprises residues 24 to 319 of human IL-12Rβ2, namely a sequence having SEQ ID NO: 9.

[0042] In some embodiments, the masking moiety comprises at least one amino acid modification as compared to the sequence of SEQ ID NO: 9, optionally wherein said modifications are cysteine substitution mutations.

[0043] In some embodiments, the masking moiety comprises SEQ ID NO: 65.

[0044] In some embodiments, the masking moiety comprises residues 24 to 622 of human IL-42Rβ2, namely a sequence having SEQ ID NO: 10.

[0045] In some embodiments, the cleavable peptide is from 6 to 10 amino acids in length.

[0046] In some embodiments, the cleavable peptide comprises an amino acid sequence of SEQ ID NO: 15.

[0047] In some embodiments, the cleavable peptide comprises an amino acid sequence of SEQ ID NO: 41.

[0048] In some embodiments, the cleavable peptide comprises an amino acid sequence of SEQ ID NO: 42.

[0049] In some embodiments, the cleavable peptide comprises an amino acid sequence of SEQ ID NO: 41

[0050] In some embodiments, the cleavable peptide comprises an amino acid sequence of SEQ ID NO: 44.

[0051] In some embodiments, the cleavable peptide comprises an amino acid sequence of SEQ ID NO: 45.

[0052] In some embodiments, the first polypeptide chain comprises:

N′ HL1-non-cleavable L1-MM C′
[0053] and the second polypeptide chain comprises

N′ HL2-cleavable L2-C C′

[0054] In some embodiments, the non-cleavable linker is between 3 and 18 amino acids in length.

[0055] In some embodiments, the non-cleavable linker is between 3 and 15 amino acids in length.

[0056] In some embodiments, the non-cleavable linker is rich in amino acid residues G and S.

[0057] In some embodiments, the non-cleavable linker includes [(G)ₙS], where n=4 or 5.

[0058] In some embodiments, the non-cleavable linker comprises an amino acid sequence as shown in SEQ NO: 12.

[0059] In some embodiments, the non-cleavable linker comprises an amino acid sequence as shown in SEQ ID NO: 13.

[0060] In some embodiments, the non-cleavable linker comprises an amino acid sequence as shown in SEQ ID NO: 14.

[0061] In some embodiments, the non-cleavable linker comprises an amino acid sequence as shown in SEQ ID NO: 54 (GGSGGSGGSGGSGGSSGP).

[0062] In some embodiments, the non-cleavable linker comprises an amino acid sequence as shown in SEQ ID NO: 55 (PGGSGP).

[0063] In some embodiments, the non-cleavable linker comprises an amino acid sequence as shown in SEQ ID NO: 56 (GGSPG).

[0064] In some embodiments, the cleavable linker comprises a proteolytically cleavable peptide (CP) flanked on both sides by a spacer domain (SD):

SD1-CP-SD2

[0065] where SD1 and SD2 are different, such that the first polypeptide chain comprises:

N′ HL1-non-cleavable L1-MM C′
[0066] and the second polypeptide chain comprises:

N′ HL2-SD1-CP-SD2-C C′

[0067] In some embodiments, the first spacer domain (SD1) is between 3 and 10 amino acids in length.

[0068] In some embodiments, SD1 comprises SEQ ID NO: 16.

[0069] In some embodiments, SD1 comprises SEQ ID NO: 7.

[0070] In some embodiments, the second spacer domain (SD2) is between 3 and 6 amino acids in length.

[0071] In some embodiments, SD2 comprises SEQ ID NO: 8.

[0072] In some embodiments, the proteolytically cleavable linker comprises SD1-CP-SD2 where SD1 is a first spacer domain, CP is a cleavable peptide and SD2 is a second spacer domain, and wherein CP has an amino acid sequence as shown in SEQ ID NO: 44 and SD2 has an amino acid sequence as shown in SEQ ID NO: 18.

[0073] In some embodiments, the proteolytically cleavable linker comprises SD1-CP-SD2 where SDI. is a first spacer domain, CP is a cleavable peptide and SD2 is a second spacer domain, and wherein CP has an amino acid sequence as shown in SEQ ID NO: 45 and SD2 has an amino acid sequence as shown in SEQ ID NO: 18.

[0074] In some embodiments, the cleavable linker comprises SEQ ID NO: 19.

[0075] In some embodiments, the cleavable linker comprises SEQ ID NO: 20.

[0076] In some embodiments, the cleavable linker comprises SEQ ID NO: 46. (GGSGGSMPYDLYHPSGP)

[0077] In some embodiments, the cleavable linker comprises SEQ ID NO: 47.

(GGSGGSGGSMPYDLYHPSGP)

[0078] In some embodiments, the cleavable linker comprises SEQ ID NO: 48. (GGSGGSDSGGFMLTSGP)

[0079] In some embodiments, the cleavable linker comprises SEQ ID NO: 49.

(GGSGGSGGSDSGGFMLTSGP)

[0080] In some embodiments, the cleavable linker comprises SEQ ID NO: 50. (GGSGGSRAAAVKSPSGP)

[0081] In some embodiments, the cleavable linker comprises SEQ ID NO: 51.

(GGSGGSGGSRAAAVKSPSGP)

[0082] In some embodiments, the cleavable linker comprises SEQ ID NO: 52. (GGSGGSISSGLLSGRSSGP)

[0083] In some embodiments, the cleavable linker comprises SEQ ID NO: 53.

(GGSGGSGGSISSGLLSGRSSGP)

[0084] In some embodiments, the first half-life extension domain comprises a first IgG1 Fc domain or a fragment thereof and the second half-life extension domain comprises a second IgG1 Fc domain or a fragment thereof.

[0085] In some embodiments, the first and/or second Fc domains each contain one or more modifications that promote the non-covalent association of the first and the second half-life extension domains.

[0086] In some embodiments, the first half-life extension domain comprises SEQ ID NO: 25 (Y349C; T366S; L38A; Y407V; and N297A) and the second half-life extension domain comprises SEQ ID NO 26 (S354C, T366W and N297A).

[0087] In some embodiments, the first half-life extension domain comprises SEQ ID NO: 27 (Y349C; T366S; L38A; Y407V, N297A and I253A) and the second half-life extension domain comprises SEQ ID NO: 28 (S354C, T366W, N297A and I253A).

[0088] In some embodiments, the first polypeptide chain comprises an amino acid sequence of SEQ ID NO:34 and a second polypeptide chain comprises an amino acid sequence of SEQ ID NO: 40.

[0089] Provided herein is a cleavage product capable of binding to IL-12R, the cleavage product comprising an IL-12 cytokine or functional fragment thereof, preparable by proteolytic cleavage of the cleavable peptide in a masked IL-12 cytokine as defined in of any one of the statements or embodiments described herein.

[0090] Provided herein is a cleavage product of a masked IL-12 cytokine, where the cleavage product is capable of binding to IL-12R, the cleavage product comprising a polypeptide comprising:

PCP-SD2-C
[0091] wherein PCP is a portion of a proteolytically cleavable peptide; SD2 is a spacer domain; and C is an IL-12 cytokine, or functional fragment thereof.

[0092] In some embodiments, PCP is a portion of a proteolytically cleavable peptide as described herein.

[0093] In some embodiments, SD2 is a spacer domain as described herein.

[0094] In some embodiments, C is min IL-12 cytokine or functional fragment thereof as described herein.

[0095] In some embodiments, the cleavage product comprises an amino acid sequence having about or at least about 85%, 86%, 87%, 88%, 89%, 90%, 91%, 92%, 93%, 94%, 95%, 96%, 97%, 98%, or 99% sequence identity to an amino acid sequence selected from the group consisting of SEQ ID NO: 29.

[0096] In some embodiments, the cleavage product comprises an amino acid sequence of SEQ ID NO: 29.

[0097] Provided herein is a nucleic acid encoding any one of the masked IL-12 cytokines described herein.

[0098] Provided herein is a nucleic acid encoding one of the chains of any one of the masked IL-12 cytokines described herein.

[0099] Provided herein is a vector comprising a nucleic acid described herein.

[0100] Provided herein is a vector comprising a nucleic acid encoding a masked -12 cytokine described herein.

[0101] Provided herein is a vector comprising a nucleic acid encoding one of the chains of a masked IL-12 cytokine described herein.

[0102] Provided herein is a host cell comprising a nucleic acid described herein.

[0103] In one embodiment, the host cell is a HEK cell. In another embodiment, the host cell is a CHO cell.

[0104] Provided herein is a composition comprising any one of the masked IL-12 cytokines described herein.

[0105] Provided herein is a pharmaceutical composition comprising any one of the masked IL-12 cytokines described herein and a pharmaceutically acceptable carrier.

[0106] In some embodiments, the pharmaceutical composition is in single unit dosage form.

[0107] In some embodiments, the pharmaceutical composition is formulated for intravenous administration and is in single unit dosage form.

[0108] In some embodiments, the pharmaceutical compost on is formulated for injection and is in single unit dosage form.

[0109] In some embodiments, the pharmaceutical compositions a liquid and is in single unit dosage form.

[0110] Provided herein is a kit comprising a masked IL-12 cytokine as described herein, or a composition described herein, or a pharmaceutical composition described herein.

[0111] Provided herein is a method of producing a masked IL-12 cytokine as described herein comprising culturing a host cell described herein under a condition that produces the masked IL-12 cytokine.

[0112] Provided herein is a nucleic acid encoding a cleavage product described herein.

[0113] Provided herein is a composition comprising a cleavage product described herein.

[0114] Provided herein is a pharmaceutical composition comprising a cleavage product described herein, and a pharmaceutically acceptable carrier.

[0115] Provided herein is a masked IL-12 cytokine described herein for in medicine.

[0116] Provided herein is a cleavage product described herein for use in medicine.

[0117] Provided herein is a method of treating or preventing cancer in a subject, the method comprising administering to the subject an effective amount of a masked IL-12 cytokine described herein.

[0118] Provided herein is a method of treating or preventing cancer in a subject, the method comprising administering to the subject an effective amount of a composition described herein.

[0119] Provided herein is a method of treating or preventing cancer in a subject, the method comprising administering to the subject an effective amount of a pharmaceutical composition described herein.

[0120] Provided herein is a method of treating or preventing cancer in a subject, the method comprising administering to the subject an effective amount of a masked IL-12 cytokine described herein, whereby the masked cytokine is proteolytically cleaved in vivo to produce a cleavage product described herein.

[0121] Provided herein is a method of treating or preventing cancer in a subject, the method comprising a step of producing a cleavage product in vivo that is capable of binding to its cognate receptor, wherein the cleavage product is described herein:

[0122] In some embodiments, the cancer is a solid tumor.

[0123] Provided herein is a masked IL-12 cytokine described herein for use in treating or preventing cancer.

[0124] Provided herein is a masked IL-12 cytokine described herein for use in a method of treating or preventing cancer, the method comprising administering to the subject an effective amount of the masked IL-12 cytokine, whereby the masked cytokine is proteolytically cleaved in vivo to produce a cleavage product as described herein.

[0125] In some embodiments, the cancer is a solid tumor.

[0126] Provided herein is a cleavage product described herein for use in treating or preventing cancer.

[0127] Provided herein is a cleavage product described herein for use in a method of treating or preventing cancer, the method comprising a step of administering a masked cytokine described herein to a patient, thereby producing the cleavage product by proteolytic cleavage of the masked cytokine in vivo.

[0128] Provided herein is a cleavage product described herein for use in a method of treating or preventing cancer in a subject, the method comprising a step of producing the cleavage product by in vivo proteolytic cleavage from a masked cytokine described herein that has been administered to the subject.

[0129] In some embodiments, the cancer is a solid tumor.

[0130] Provided herein is a pharmaceutical composition described herein for use in beating or preventing cancer.

[0131] In some embodiments, the cancer is a solid tumor.

### A BRIEF DESCRIPTION OF THE DRAWINGS

[0132] FIG. 1 shows the structure of exemplary embodiments of a masked cytokine that includes a masking moiety, a cytokine or functional fragment thereof (“cytokine”), a half-life extension domain, and a first linker that includes a first cleavable peptide (“1CP”), a first N-terminal spacer domain (“1NSD”), and a first C-terminal spacer domain (“1CSD”). These exemplary embodiments also include a second linker that includes a second cleavable peptide (“2CP”), a second N-terminal spacer domain (“2NSD”), and a second C-terminal spacer domain (“2CSD”). As shown by the arrows, while the exemplary embodiments shows the masking moiety linked to the first linker, and the cytokine or functional fragment thereof is linked to the first linker and the second linker, the masking moiety and the cytokine or functional fragment thereof can be interchanged such that the cytokine or functional fragment thereof is linked to the first linker, and the masking moiety is linked to the first linker and the second linker. FIG. 1 shows the structure of an exemplary embodiment of a masked cytokine as a monomer.

[0133] FIG. 2 shows the structure of an exemplary embodiment of a masked cytokine that includes a masking moiety, a cytokine or functional fragment thereof (“cytokine”), a first half-life extension domain, and a second half-life extension domain. The exemplary embodiment shown in FIG. 2 also includes a first linker that includes a first cleavable peptide (“1CP”), a first N-terminal spacer domain (“INSD”), and a first C-terminal spacer domain (“1CSD”), and a second linker that includes a second cleavable peptide (“2CP”), a second N-terminal spacer domain (“2NSD”), and a second C-terminal spacer domain (“2CSD”). The exemplary first and second half-life extension domains include “knobs into holes” modifications that promote the association of the first half-life extension domain with the second half-life extension domain, as shown by the “hole” in the first half-life extension domain and the “knob” in the second half-life extension domain. The first half-life extension domain and the second half-life extension domain are also shown as associating, at least in part, due to the formation of disulfide bonds. It is to be understood that although the “hole” is depicted as part of the first half-life extension domain (linked to the masking moiety) and the “knob” is depicted as part of the second half-life extension domain (linked to the cytokine), the “hole” and the “knob” can alternatively be included in the second half-life extension domain and the first half-life extension domain, respectively, so that the “hole” is a part of the second half-life extension domain (linked to the cytokine) and the “knob” is part of the first half-life extension domain (linked to masking moiety).

[0134] FIGS. 3A-3B show exemplary embodiments of masked cytokines prior to (left) and after (right) cleavage by a protease, such as at the tumor microenvironment. FIGS. 3A-3B show exemplary embodiments of a masked IL-2 cytokine. Cleavage by a protease releases a masking moiety (e.g., IL-2Rβ3, as shown in FIG. 3B), or releases an IL-2 (FIG. 3A).

[0135] FIG. 4 shows SDS-PAGE analysis on flow-through (FT) samples (i.e., proteins that did not bind to the Protein A column) and the eluted (E) samples (i.e., proteins that bound to the Protein A column and were eluted from it) following production and purification of IL-2 constructs (AK304, AK305, AK307, AK308, AK309, AK310, AK311, AK312, AK313, AK314, and AK315).

[0136] FIGS. 5A-5D show results from SPR analysis that tested the binding of an exemplary masked IL-2 polypeptide constructs (AK168), or a rhIL2 control, to CD25-Fc. FIG. 5A shows the interaction between AK168 and CD25-Fc, FIG. 5B shows the interaction between AK168 activated with MMP and CD25-Fc, and FIG. 5C shows the interaction between a recombinant human TL-2 (rhIL-2) control and CD25-Fc. FIG. 5D provides a table summarizing the data obtained for the association constant (ka), dissociation constant (kd), equilibrium dissociation constant (KD), as well as the Chi2 value and U-value for each interaction.

[0137] FIGS. 6A-6D shows results from SPR analysis that tested the binding of an exemplary masked IL-2 polypeptide constructs (AK111), or a rhIL-2 control, to CD122-Fc. FIG. 6A shows the interaction between AK111 and CD122-Fc, FIG. 6B shows the interaction between AK111 activated with protease and CD122-Fc, and FIG. 6C shows the interaction between a recombinant human IL-2 (rhIL-2) control and CD122-Fc. FIG. 6D provides a table summarizing the data obtained for the association constant (ka), dissociation constant (kd), equilibrium dissociation constant (KD), as well as the Chi2 value and U-value for each interaction.

[0138] FIG. 7A shows an exemplary embodiment of a masked cytokines prior to (left) and after (right) cleavage by a protease, such as at the tumor microenvironment. FIG. 7B shows SDS-PAGE analysis of an exemplary masked IL-2 polypeptide construct that was incubated in the absence (left lane) or presence (right lane) of the MMP10 protease, which demonstrates the release of IL-2 from the Fc portion.

[0139] FIGS. 8A-8D show STAT5 activation (%) in PBMCs treated with the construct AK032, AK035, AK041, or rhIL-2 as a control. The levels of STATS activation (%) are shown for NK cells, CD8+ T cells, effector T cells (Teff), and regulatory T cells (Treg), as determined following incubation with rhIL-2 (FIG. 8A), AK032 (FIG. 8B), AK035 (FIG. 8C), or AK041 (FIG. 8D).

[0140] FIGS. 9A-9C show STATS activation (%) in PBMCs treated with the construct AK081 or AK032. The AK081 construct with and without prior exposure to MMP10 was tested. An isotype control as well as a no IL-2 negative control was also tested. The levels of STAT5 activation (%) are shown for NK cells (FIG. 9A), CD8+ T cells (FIG. 9C), and CD4+ T cells (FIG. 9B).

[0141] FIGS. 10A-10D show the results from STAT5 activation studies in PBMCs using constructs AK081 and AK111, as well as controls that included an rhIL-2 and anti-RSV antibody. A no-treatment control was also tested. EC50 (pM) is also shown for the rhIL-2,AK081, and AK111 treatments. STAT5 activation (%) is shown for CD4+FoxP3+CD25+ cells (FIG. 10A), CD8+ cells (FIG. 10B), and CD4+FoxP3−CD25− cells (FIG. 10C). FIG. 10D provides EC50 (pM) and fold-change data for the AK081, AK111 constructs, as well as the rhIL-2 control.

[0142] FIGS. 11A-11D show the results from STAT5 activation studies in PBMCs using constructs AK167 and AK168, as well as controls that included an rhIL-2 and anti-RSV antibody. A no-treatment control was also tested. EC50 (pM) is also shown for the rhIL-2, AK167, and AK168 treatments. STAT5 activation (%) is shown for CD4+FoxP3+CD25+ cells (FIG. 11A), CD8+ cells (FIG. 11B), and CD4+FoxP3−CD25− cells (FIG. 11C). FIG. 110 provides EC50 (pM) and fold-change data for the AK167 and AK168 constructs, as well as the rhIL-2 control.

[0143] FIGS. 12A-12D show STAT5 activation (%) in PBMCs treated with the construct AK165 or AK166, or an isotype control or an IL-2-Fc control, that were (+MMP10) or were not previously exposed to the MMP10 protease. The key as shown in FIG. 12A also applies to FIG. 12B, and the key as shown in FIG. 12C also applies to FIG. 12D. STAT5 activation (%) is shown for CD4+FoxP3+ T regulatory cells (FIG. 12A), CD4+FoxP3− T helper cells (FIG. 12B). CD8+ cytotoxic T cells (FIG. 12C), and CD56+ NK cells (FIG. 12D).

[0144] FIGS. 13A-13C show STAT5 activation (%) in PBMCs treated with the construct AK109 or AK110, or alt isotype control or an IL-2-Fc control, that were (+MMP10) or were not previously exposed to the MMP10 protease. The key as shown in FIG. 12B also applies to FIG. 13A. STAT5 activation (%) is shown for NK cells (FIG. 13A), CD8 cells (FIG. 13B), and CD4 cells (FIG. 13C).

[0145] FIGS. 14A-14D show the results front STAT5 activation studies in PBMCs using the constructs AK211, AK235, AK253, AK306, AK310, AK314, and AK316, as well as an rhIL-2 control. STAT5 activation (%) is shown for CD3+CD4+FoxP3+ cells (FIG. 14A), CD3+CD4+FoxP3− cells (FIG. 14B), and CD3+CD8+ cells (FIG. 14C), FIG. 14D provides EC50 data for each of the tested constructs as well as the rhIL-2 control.

[0146] FIGS. 15A-15D show the results from STAT5 activation studies in PBMCs using the constructs AK081, AK167, AK216, AK218, AK219, AK220, and AK223 that have been activated by protease, as well as an rhIL-2 control. STAT5 activation (%) is shown for CD4+FoxP3+CD25+ regulatory T cells (FIG. 15A), CD4+FoxP3−CD25− cells (FIG. 15B), and CD8+ cells (FIG. 15C). FIG. 15D provides EC50 data for each of the tested constructs as well as the rhIL-2 control.

[0147] FIGS. 16A-16C show STATS activation (%) in PBMCs treated with the construct AK081, AK189, AK190, or AK210, or an anti-RSV control. The key as shown in FIG. 16A also applies to FIGS. 16B and 16C. STAT5 activation (%) is shown for regulatory T cells (FIG. 16A), CD4 helper T cells (FIG. 16B), and CD8 cells (FIG. 16C).

[0148] FIGS. 17A-17C show STATS activation (%) in PBMCs treated with the construct AK167, AK191, AK192, or AK193, or an anti-RSV control. The key as shown in FIG. 17A also applies to FIGS. 17B and 17C. STAT5 activation (%) is shown for regulatory T cells (FIG. 17A), CD4 helper T cells (FIG. 17B), and CD8 cells (FIG. 17C).

[0149] FIGS. 18A-18D show results from pharmacokinetic studies carried out in tumor-bearing mice using the construct AK032, AK081, AK111, AK167, or AK168, or an anti-RSV control. FIG. 18A provides a simplistic depiction of the structure of each of the constructs tested. FIG. 18B shows Fc levels in plasma (μg/mL) by detecting human IgG, FIG. 18C shows Fc-CD122 levels in plasma (μg/mL) by detecting human CD 122, and FIG. 18B shows Fc-IL2 levels in plasma (μg/mL) by detecting human IL-2. Prior to the detection step, an anti-human IG was used as the capture antibody.

[0150] FIGS. 19A-19D show results from pharmacokinetic studies carried out in tumor-bearing mice using the construct AK167, AK191 AK197, AK203, AK209, or AK211, or an anti-RSV control. FIG. 19A provides a simplistic depiction of the structure of each of the constructs tested. FIG. 19B shows Fc levels in plasma (ug/mL) by detecting human IgG, FIG. 19C shows Fc-IL2 levels in plasma (μg/mL) by detecting human IL-2, and FIG. 19D shows Fc-CD122 levels in plasma (μg/mL) by detecting human CD 122. Prior to the detection step, an anti-human IG was used as the capture antibody.

[0151] FIGS. 20A-20L show results from studies testing the in vivo responses of CD4, CD8, NK, and Treg percentages in spleen, blood, and tumor, using the AK032, AK081, AK111, AK167, or AK168 construct, or an anti-RSV IgG control. For spleen tissue, % CD8 cells of CD3 cells (FIG. 20A), % CD4 of CD3 cells (FIG. 20B), % NK cells of CD3− cells (FIG. 20C), % FoxP3 of CD4 cells (FIG. 20D) is shown. For blood, % CD8 cells of CD3 cells (FIG. 20E), % CD4 of CD3 cells (FIG. 20F), % NK cells of CD3− cells (FIG. 20G), % FoxP3 of CD4 cells (FIG. 20H) is shown. For tumor tissue, % CD8 cells of CD3 cells (FIG. 20I), % CD4 of CD3 cells (FIG. 20J), % NK cells of CD3− cells (FIG. 20K), % FoxP3 of CD4 cells (FIG. 20L) is shown.

[0152] FIGS. 21A-21L show results from studies testing the fa vivo responses of CD4, CD8, NK, and Treg percentages in spleen, blood, and tumor, using the AK167, AK168, AK191, AK197, AK203, AK209, or AK211 construct, or an anti-RSV IgG control. For spleen tissue, % CD8 cells of CD3 cells (FIG. 21A), % CD4 of CD3 cells (FIG. 21B), % NK cells of CD3− cells (FIG. 2IC), % FoxP3 of CD4 cells (FIG. 21D) is shown. For blood, % CD8 cells of CD3 cells (FIG. 21E), % CD4 of CD3 cells (FIG. 21F), % NK cells of CD3− cells (FIG. 21G), % FoxP3 of CD4 cells (FIG. 21H) is shown. For tumor tissue, % CD8 cells of CD3 cells (FIG. 2H), % CD4 of CD3 cells (FIG. 21J), % NK cells of CD3− cells (FIG. 21K), % FoxP3 of CD4 cells (FIG. 21L) is shown.

[0153] FIGS. 22A-22L show results from studies testing the in viva responses of CD4, CD5, NK, and Treg percentages in spleen, blood, and tumor, using the AK235, AK191, AK192, AK193, AK210, AK189, AK190, or AK211 construct, or an anti-RSV IgG control. For spleen tissue, % CD8 cells of CD3 cells (FIG. 22A), % CD4 of CD3 cells (FIG. 22B), % NK cells of CD3− cells (FIG. 22C), % FoxP3 of CD4 cells (FIG. 22C) is shown. For blood, % CD8 cells of CD3 cells (FIG. 22E), % CD4 of CD3 cells (FIG. 22F), % NK cells of CD3− cells (FIG. 22G), % FoxP3 of CD4 cells (FIG. 22H) is shown. For tumor tissue, % CD8 cells of CD3 cells (FIG. 22I), % CD4 of CD3 cells (FIG. 22J),% NK cells of CD3− cells (FIG. 22K), % FoxP3 of CD4 cells (FIG. 22L) is shown.

[0154] FIGS. 23A-23I show results from in cell activation in spleen, blood, and tumor, using the AK235, AK191, AK192, AK193, AK210, AK189, AK190, or AK211 construct, cell activation was measured as the mean fluorescence intensity (NM) of CD25 in CD8+ T cells (FIG. 23A; FIG. 23D; FIG. 23G), CD4++T cells (FIG. 23B; FIG. 23E; FIG. 23H), or Foxp3+ cells (FIG. 23C; FIG. 23F; FIG. 23I) in the spleen, blood, and tumor. Statistical analysis was performed using One-way ANOVA as compared to the non-cleavable AK211 construct.

[0155] FIGS. 24A-24D show the results from studies testing the in vivo cleavage of the exemplary masked IL-2 polypeptide constructs AK168 (cleavable peptide sequence: MPYDLYHP) and AK209 (cleavable peptide sequence: VPLSLY; SEQ ID NO: 15). FIG. 24F shows results from a pharmacokinetic study of total plasma IgG concentration (μg/mL) for total levels of the AK167, AK168, and AK209 constructs, and for levels of non-cleaved forms of each construct.

[0156] FIGS. 25A-25D show results from an in vivo study that assessed vascular leakage using the exemplary masked IL-2 polypeptide construct AK11 or AK168, or the non-masked polypeptide construct AK081 or AK167, or an anti-RSV control. FIG. 25A shows the percentage (%) of body weight loss, and FIGS. 25B, 25C, and 25C shows the weight in grams of the liver, lung, and spleen, respectively, for each.

[0157] FIGS. 26A and 26B show results from an in vivo study that assessed vascular leakage as indicated by measuring the extent of dye leakage into liver and lung tissue following administration of the AK081, AK111, AK167, or AK168 construct, or an anti-RSV control. The extent of dye leakage into liver (FIG. 26A) and lung (FIG. 26B) was measured based on absorbance at 650 nm.

[0158] FIGS. 27A and 27B show results from an in vivo study that assessed vascular leakage as indicated by measuring the extent of mononuclear cell perivascular invasion into the liver and lung tissue following administration of the AK081, AK111, AK167, or AK168 construct, or an anti-RSV control. The average number of mononuclear cells in the liver (FIG. 27A) and the average number of mononuclear cells in the lung (FIG. 27B) depicted for each.

[0159] FIGS. 28A and 28B show results from a syngeneic tumor model study that assessed tumor volume and body weight over the course of treatment with the AK032, AK081, AK111, AK167, or AK168 construct, or an anti-RSV control. FIG. 28A shows data on tumor volume over the course of treatment, and FIG. 28B shows data on the percentage (%) change in body weight over the course of the treatment.

[0160] FIGS. 29A and 29B shows AK471 with 1253A FcRn mutation induced robust CD8 T cells expansion in the TME while remaining inactive in the periphery.

[0161] FIGS. 30A-30C show AK471 has slightly shorter half-life compared to aglyco-hIgG1.

[0162] FIGS. 31A-31C shows there is no evidence of cleavage or decapitation with AK471 in the plasma.

[0163] FIG. 32 shows exemplary IL-12 construct formats.

[0164] FIGS. 33A and 33B show exemplary cleavage processes for exemplary molecules AK380, AK381 and AK384 (FIG34A), and AK383, AK386, AK434, AK447, AK448, AK446, AK528 and AK529 (FIG349).

[0165] FIGS. 34A-34D depict the masking of IL-12 towards IL-12RB1, using SPR analysis that tested the binding of exemplary masked IL-12 polypeptide constructs (AK384 and AK386) to rhIL-12RB1-Fc. FIG. 34A depicts the interaction between AK384 and IL-12RB1-Fc, FIG. 34B depicts the interaction between AK386 and IL-12RB1-Fc, and FIG. 34C depicts the interaction between a recombinant human IL-12 (rhIL-12) control and IL-12RB1-Fc. FIG. 34D provides a table summarizing the data obtained for the association constant (ka), dissociation constant (kd), equilibrium dissociation constant (KD), as well as the Chi² value and U-value for each interaction. Due to the shape of the curves, accurate kinetics could not be determined and thus the KD is estimated based on the on-rate. These results demonstrate that these exemplary masked IL-12 polypeptide constructs (AK384 and AK386) did not demonstrate detectable binding to IL-12RB1-Fc, while the wild-type rhIL-12 control did demonstrate detectable binding.

[0166] FIGS. 35A-35D depict the masking of IL-12 towards IL-12RB2, using SPR analysis that tested the binding of exemplary masked IL-12 poly peptide constructs (AK384 and AK386) to rhIL-12RB2-Fc. FIG. 35A depicts the interaction between AK384 and IL-12RB2-Fc, FIG. 35B depicts the interaction between AK386 and IL-12RB2-Fc, and FIG. 35C depicts the interaction between a recombinant human IL-12 (rhIL-12) control and IL-12RB2-Fc. FIG. 35D provides a table summarizing the data obtained for the association constant (ka), dissociation constant (kd), equilibrium dissociation constant (KD), as well as the Chi² value and U-value for each interaction. Due to the shape of the curves, accurate kinetics could not be determined and thus the KD is estimated based on the on-rate. These results demonstrate that an exemplary masked IL-12 polypeptide construct (AK386) did demonstrate weak yet detectable binding to IL-12RB1-Fc, while the wild-type rhIL-12 control and an exemplary IL-12 polypeptide construct (AK384) did demonstrate detectable binding.

[0167] FIGS. 36-40 show the results from Example 6, FIGS. 41-43 show the results from Example 7. FIGS. 44-52E show the results from Example 8.

[0168] FIGS. 53A-53D and FIGS. 54A-54F show the results of a SDS-PAGE and HEK-Blue IL-2 bioassay using exemplary IL-15 constructs AK904 and AK910 that do not include a peptide substrate, and constructs AK932, AK938, AK930 and AK936 that do include a peptide substrate. FIGS. 53A-53D shows the SDS-PAGE gel results. FIGS. 54A-54F show the HEK-Blue IL-2 bioassay results.

[0169] FIGS. 55-68 show the results of Example 11. The PK/PD of exemplary routinized molecules AK944, AK945, AK947 and control AK948 were analysed in vivo in two tumor models, MB49 and B16F10.

[0170] FIGS. 69-71B show the results of Example 12. The PK, PD, hematology and serum chemistry of exemplary molecules AK667, AK921, AK923 and control AK671 were analysed in cynomolgus monkeys.

### DETAILED DESCRIPTION

[0171] By using a masking moiety, the systemic side effects of an administered IL-12 cytokine or functional fragment thereof can be reduced by interfering with the binding capability of the IL-12 cytokine or functional fragment thereof to its cognate receptor.

[0172] Interleukin 12 receptor is a type I cytokine receptor, binding interleukin 12. It consists of beta 1 and beta 2 subunits.

[0173] By masking the IL-12 cytokine or functional fragment thereof using a linker that includes a proteolytically cleavable peptide, the binding capability that is interfered with by using the masking moiety can be restored by cleavage of the cleavable peptide at the tumor microenvironment. Thus, the masked IL-12 cytokines provided herein are engineered to precisely target pharmacological activity to the tumor microenvironment by exploiting one of the hallmarks of cancer, high local concentrations of active protease. This feature of the tumor microenvironment is used to transform a systemically inert molecule into a locally active IL-12 cytokine or functional fragment thereof in the form of an IL-12 cleavage product. Activation of the IL-12 cytokine or functional fragment thereof at the tumor microenvironment significantly reduces systemic toxicities that can be associated with drugs that are administered to a subject in active form. Thus, the masked IL-2 cytokines of the invention may be viewed as a pro-drug.

[0174] Masked 11,-12 cytokines described herein have been found to show various advantageous properties. Masked IL-12 cytokines described anywhere herein have been found to be capable of activating immune cells (proliferation and expansion) upon proteolytic cleavage, preferentially in the tumor microenvironment and at lower levels in the periphery. Masked IL-12 cytokines described anywhere herein have been found to be capable of promoting tumor eradication (i.e. show anti-tumor activity) and inhibition of metastasis upon proteolytic cleavage. Masked IL-12 cytokines described anywhere herein have been found to demonstrate advantageous prolonged drug exposure. Masked IL-12 cytokines described herein have been found to demonstrate advantageous stability. Masked IL-12 cytokines described herein have been found to demonstrate advantageous tolerability. Further, masked IL-12 cytokines described herein have been found. to demonstrate advantageous potency.

### 1. ‘HETERODIMERIC’ MASKED CYTOKINES

[0175] Provided herein, in some embodiments, is a masked cytokine comprising a masking moiety in a first polypeptide chain and an IL-12 cytokine or functional fragment thereof in a second polypeptide chain. Such masked cytokines may be referred to as ‘heterodimeric’ masked cytokines.

[0176] In some embodiments, the masked cytokine comprises a protein heterodimer comprising:
[0177] a) a first polypeptide chain comprising a masking moiety linked to a first half-life extension domain via a first linker; and
[0178] b) a second polypeptide chain comprising an IL-12 cytokine or functional fragment thereof linked to a second half-life extension domain via a second

[0179] wherein the first half-life extension domain is associated with the second half-life extension domain, and wherein one of the first linker or the second linker comprises a proteolytically cleavable peptide.

[0180] The masking moiety, half-life extension domains, IL-12 cytokine or functional fragment thereof, linkers and type of association between the first half-life extension domain and the second half-life extension domain may be any one of those described herein, and any combination of those described herein.

[0181] In some embodiments, in the first polypeptide chain, the first half life extension domain is linked to the amino terminus of the first linker and the carboxy terminus of the first linker is linked to the amino terminus of the masking moiety and, in the second polypeptide chain, the second half life extension domain is linked to the amino terminus of the second linker and the carboxy terminus of the second linker is linked to the amino terminus of the IL-12 cytokine or functional fragment thereof. This is shown schematically below where:

[0182] the first polypeptide chain comprises:

N′ HL1-L1-MM C′

[0183] and the second polypeptide chain comprises:

N′ HL2-L2-C C′

[0184] where HL1 is the first half life extension domain, L1 is the first linker, MM is the masking moiety, HL2 is the second half life extension domain, L2 is the second linker, and C is the IL-12 cytokine or functional fragment thereof.

[0185] 1.1 IL-12 Cytokines

[0186] Provided herein is an IL-12 cytokine or functional fragment thereof for use in a masked cytokine or cleavage product thereof. A cytokine plays a role in cellular signalling, particularly in cells of the immune system. IL-12 is an interleukin, which is a type of cytokine signalling molecule in the immune system that regulates activities of white blood cells.

[0187] Endogenous IL-12 exists as two distinct molecules IL-12 p40 and IL-12p35, that dimerize in the cell during biosynthesis.

[0188] The full sequences of IL-12 p40 and IL-12 p35 are (pro-peptides cleaved off during biosynthesis are shown) in bold):

IL-12 p40 subunit:
MCHQQLVISWFSLVFLASPLVAIWELKKDVYVVELDWYPDAPGEMVVLTCDTPEEDGITW
TLDQSSEVLGSGKTLTIQVKEFGDAGQYTCHKGGEVLSHSLLLLHKKEDGIWSTDILKDQ
KEPKNKTFLRCEAKNYSGRFTCWWLTTISTDLTFSVKSSRGSSDPQGVTCGAATLSAERV
RGDNKEYEYSVECQEDSACPAAEESLPIEVMVDAVHKLKYENYTSSFFIRDIIKPDPPKN
LQLKPLKNSRQVEVSWEYPDTWSTPHSYFSLTFCVQVQGKSKREKKDRVFTDKTSATVIC
RKNASISVRAQDRYYSSSWSEWASVPCS
IL-12 p35 subunit:
MCPARSLLLVATLVLLDHLSLARNLPVATPDPGMFPCLHHSQNLLRAVSNMLQKARQTLE
FYPCTSEEIDHEDITKDKTSTVEACLPLELTKNESCLNSRETSFITNGSCLASRKTSFMM
ALCLSSIYEDLKMYQVEFKTMNAKLLMDPKRQIFLDQNMLAVIDELMQALNFNSETVPQK
SSLEEPDFYKTKIKLCILLHAFRIRAVTIDRVMSYLNAS
The mature forms are as follows:
IL-12 p40 subunit:
IWELKKDVYVVELDWYPDAPGEMVVLTCDTPEEDGITWTLDQSSEVLGSGKTLTIQVKEFGDA
GQYTCHKGGEVLSHSLLLLHKKEDGIWSTDILKDQKEPKNKTFLRCEAKNYSGRFTCWWLTTIS
TDLTPSVKSSRGSSDPQGVTCGAATLSAERVRGDNKEYEYSVECQEDSACPAAEESLPIEVMVD
AVHKLKYENYTSSFFIRDIIKPDPPKNLQLKPLKNSRQVEVSWEYPDTWSTPHSYFSLTFCVQVQ
GKSKREKKDRVFTDKTSATVICRKNASISVRAQDRYYSSSWSEWASVPCS
IL-12 p35 subunit:
RNLPVATPDPGMFPCLHHSQNLLRAVSNMLQKARQTLEFYPCTSEEIDHEDITKDKTSTVEACLP
LELTKNESCLNSRETSFITNGSCLASRKTSFMMALCLSSIYEDLKMYQVEFKTMNAKLLMDPKR
QIFLDQNMLAVIDELMQALNFNSETVPQKSSLEEPDFYKTKIKLCILLHAFRIRAVTIDRVMSYLN
AS

[0189] They are expressed as two chains that covalently dimerize during biosynthesis through a disulfide bound between the two subunits: Cysteine C199 of the p40 subunit associates with Cysteine C96 of the p35 subunit.

[0190] “Functional fragments” of an IL-12 cytokine comprise a portion of a full length cytokine protein which retains or has modified cytokine receptor binding capability (e.g., within at least 50%, 80%, 90%, 95%, 96%, 97%, 98%, 99% or 100% activity compared to the full length cytokine protein). Cytokine receptor binding capability can be shown, for example, by the capability of a cytokine to bind to the cytokine's cognate receptor or a component thereof.

[0191] In some embodiments, the IL-12 cytokine or functional fragment thereof is any naturally occurring interleukin-2 (IL-12) protein or modified variant thereof capable of binding to an interleukin-I2 receptor.

[0192] In some embodiments, the IL-12 polypeptide or functional fragment thereof comprises an IL-12p40 polypeptide or functional fragment thereof covalently linked to an IL-12p35 polypeptide or functional fragment thereof.

[0193] The IL-12p40 polypeptide or functional fragment thereof may be attached to the first half life extension domain such that the first polypeptide chain comprises:

N′ HL1-L1MM C′

[0194] and the second polypeptide chain comprises:

N′ HL2-L2-[IL-12p40-linker-IL-12p35] C′

[0195] where ‘IL-12p40’ is the IL-12p40 polypeptide or functional fragment thereof and ‘IL-12p35’ is the IL-12p35 poly peptide or functional fragment thereof.

[0196] In some embodiments, the IL-12p40 polypeptide comprises SEQ ID NO: 1. In some embodiments, the IL-12p40 polypeptide comprises an amino acid sequence having at least one amino acid modification as compared to the amino acid sequence of SEQ ID NO: 1. Each of the at least one amino acid modifications can be any amino acid modification, such as a substitution, insertion, or deletion. In some embodiments, the IL-12 cytokine or functional fragment thereof comprises an amino acid sequence haying at least 1, at least 2, at least 3, at least 4, at least 5, at least 6, at least 7, at least 8, at least 9, or at least 10 amino acid substitutions as compared to the amino acid sequence of SEQ ID NO: 1. In some embodiments, the IL-12 cytokine or functional fragment thereof comprises an amino acid sequence having at least 5 amino acid substitutions as compared to the amino acid sequence of SEQ ID NO: 1,

[0197] The IL-12p40 poly peptide comprises a glycosaminoglycan (GAG)-binding domain GAGs, such as heparin and heparan sulphate, have been shown to bind numerous growth factors and cytokines, including IL-12. The physiological significance of this binding is two-fold. First, GAGs can serve as co-receptors on cell surfaces to maintain high, local concentrations of cytokines. Second, GAGs can regulate bioactivities of growth factors and cytokines through multiple mechanisms including dimerization and protection from proteolytic degradation.

[0198] The GAG-binding domain in the mature form of the IL-12 p40 subunit is shown below in bold:

IWELKKDVYVVELDWYPDAPGEMVVLTCDTPEEDGITWTLDQSSEVLGS
GKTLTIQVKEFGDAGQYTCHKGGEVLSHSLLLLHKKEDGIWSTDILKDQ
KEPKNKTFLRCEAKNYSGRFTCWWLTTISTDLTFSVKSSRGSSDPQGVT
CGAATLSAERVRGDNKEYEYSVECQEDSACPAAEESLPIEVMVDAVHKL
KYENYTSSFFIRDIIKPDPPKNLQLKPLKNSRQVEVSWEYPDTWSTPHS
YFSLTFCVQVQGKSKREKKDRVFTDKTSATVICRKNASISVRAQDRYYS
SSWSEWASVPCS

[0199] Modifications to the GAG-binding domain KSKREKKDRV) has been shown herein to increase the PK profile of constructs comprising an IL-12 cytokine with a mutated GAG-binding domain, without any decrease in cytokine activity. Thus, in some embodiments, the IL-12p40 polypeptide comprises at least one amino acid modification to the GAG-binding domain. in some embodiments, the modification to the GAG-binding domain is a deletion mutation. In some embodiments, the modification to the GAG-binding domain is a deletion mutation and at least one substitution mutation.

[0200] In some embodiments the GAG-binding domain comprises the amino acid sequence KDNTERV. In some embodiments, the IL-12p40 polypeptide comprises the amino acid sequence SEQ ID NO: 57. In some embodiments, the GAG-binding domain comprises the ammo acid sequence KDNTEGRV. In some embodiments, the IL-12p40 poly peptide comprises the amino acid sequence SEQ ID NO: 58.

[0201] In some embodiments, the, GAG-binding domain consists of the amino acid sequence KDNTERV. In some embodiments, the IL-12p40 polypeptide comprises the amino acid sequence SEQ ID NO: 57. In some embodiments, the GAG-binding domain consists of the amino acid sequence KDNTEGRV. In some embodiments, the IL-12p40 polypeptide comprises the amino acid sequence SEQ IL) NO: 58.

[0202] In some embodiments, the IL-12p40 polypeptide comprises an amino acid sequence having one or more cysteine substitutions as compared to the amino acid sequence of SEQ ID NO: 1. In some embodiments, the IL-12p40 polypeptide comprises an amino acid sequence having an amino acid substitution at position C252 as compared to the amino acid sequence of SEQ ID NO: 1. In some embodiments, the amino acid substitution at position C252 is C252S. In some embodiments, the IL-12p40 polypeptide comprises an amino acid sequence of SEQ ID NC): 59. In some embodiments, the IL-12p40 polypeptide comprises art amino acid sequence having about or at least about 85%, 86%, 87%, 88%, 89%, 90%, 91%, 92%, 93%, 94%, 95%, 96%, 97%, 98%, or 99% sequence identity to the amino acid sequence of SEQ ID NO: 59. In some embodiments, the IL-12p40 polypeptide consists of an amino acid sequence of SEQ ID NO: 59.

[0203] In some embodiments, the IL-12p40 polypeptide comprises an amino acid sequence having one or more cysteine substitutions as compared to the amino acid sequence of SEQ ID NO: 1, and at least one amino acid modification to the GAG-binding domain. In some embodiments, the IL-12p40 polypeptide comprises an amino acid substitution at position 02525 as compared to the amino acid sequence of SEQ ID NO: 1, and the GAG-binding domain comprises the amino acid sequence KDNTERV. In some embodiments, the IL-12p40 polypeptide comprises an amino acid substitution at position C252S as compared to the amino acid sequence of SEQ ID NO: 1, and the GAG-binding domain comprises the amino acid sequence KDNITEGRV. In some embodiments, the IL-12p40 polypeptide comprises an amino acid sequence of SEQ ID NO: 60. In some embodiments, the IL-12p40 polypeptide comprises an amino acid sequence having about or at least about 85%, 86%, 87%, 88%, 89%, 90%, 91%, 92%, 93%, 94%, 95%, 96%, 97%, 98%, or 99% sequence identity to the amino acid sequence of SEQ ID NO: 60. In some embodiments, the IL-12p40 polypeptide consists of an amino acid sequence of SEQ ID NO: 60.

[0204] In some embodiments, the IL-12p35 polypeptide comprises SEQ ID NO: 2. In some embodiments, the IL-12p35 polypeptide comprises an amino acid sequence having at least one amino acid modification as compared to the amino acid sequence of SEQ ID NO: 2. Each of the at least one amino acid modifications can he any amino acid modification, such as a substitution, insertion, or deletion. In some embodiments, the IL-12 cytokine or functional fragment thereof comprises an amino acid sequence having at least 1, at least 2, at least 3, at least 4, at least 5, at least 6, at least 7, at least 8, at least 9, or at least 10 amino acid substitutions as compared to the amino acid sequence of SEQ ID NO: 2. In some embodiments, the IL-12 cytokine or functional fragment thereof comprises an amino acid sequence having at least 5 amino acid substitutions as compared to the amino acid sequence of SEQ ID NO: 2.

[0205] In some embodiments, the IL-12p40-IL-12p35 linker is between 5 and 20 amino acids in length.

[0206] In some embodiments, the IL-12p40-IL-12p35 linker is rich in amino acid residues G and S.

[0207] In some embodiments, the IL-12p40-IL-12p35 linker only includes amino acid residue types selected from the group consisting of G and S.

[0208] In some embodiments, the IL-12p40-IL-12p35 linker includes [(G)ₙS], where n=4 or 5.

[0209] In some embodiments, the IL-12p40-IL-12p35 linker includes a (GGGGS) repeat.

[0210] In some embodiments, IL-12p40-IL-12p35 linker comprises SEQ ID NO: 3. (GGGGSGGGGSGGGGS)

[0211] In some embodiments, the IL-12 cytokine or functional fragment thereof comprises SEQ ID NO: 4. In some embodiments, the IL-12 cytokine or functional fragment thereof comprises an amino acid sequence having at least one amino acid modification as compared to the amino acid sequences of SEQ ID NO: 1 and 2. Each of the at least one amino acid modifications can be any amino acid modification, such as a substitution, insertion, or deletion. in some embodiments, the IL-12 cytokine or functional fragment thereof comprises an amino acid sequence having at least 1, at least 2, at least 3, at least 4, at least 5, at least 6, at least 7, at least 8, at least 9, or at least 10 amino acid substitutions as compared to the amino acid sequences of SEQ ID NO: 1 and 2. In some embodiments, the IL-12 cytokine or functional fragment thereof comprises an amino acid sequence having at least 5 amino acid substitutions as compared to the amino acid sequences of SEQ ID NO: 1 and 2.

[0212] In some embodiments, the IL-12 cytokine or functional fragment thereof comprises the amino acid sequence of SEQ ID NO: 4. In some embodiments, the IL-12 cytokine or functional fragment thereof comprises an amino acid sequence having about or at least about 85%, 86%, 87%, 88%, 89%, 90%, 91%, 92%, 93%, 94%, 95%, 96%, 97%, 98%, or 99% sequence identity to the amino acid sequence of SEQ ID NO: 4.

[0213] In some embodiments, the IL-12 cytokine or functional fragment thereof comprises the amino acid sequence of SEQ ID NO: 61. In some embodiments, the IL-12 cytokine or functional fragment thereof comprises an amino acid sequence having about or at least about 85%, 86%, 87%, 88%, 89%, 90%, 91%, 92%, 93%, 94%, 95%, 96%, 97%, 98%, or 99% sequence identity to the amino acid sequence of SEQ ID NO: 61.

[0214] In some embodiments, the IL-12 cytokine or functional fragment thereof comprises the amino acid sequence of SEQ ID NO: 62. In some embodiments, the IL-12 cytokine or functional fragment thereof comprises an amino acid sequence having about or at least about 85%, 86%, 87%, 88%, 90%, 91%, 92%, 93%, 94%, 95%, 96%, 97%, 98%, or 99% sequence identity to the amino acid sequence of SEQ ID NO: 62.

[0215] In some embodiments, the IL-12 cytokine or functional fragment thereof comprises the amino acid sequence of SEQ ID NO: 63. In some embodiments, the IL-12 cytokine or functional fragment thereof comprises an amino acid sequence having about or at least about 85%, 86%, 87%, 88%, 89%, 90%, 91%, 92%, 93%, 94%, 95%, 96%, 97%, 98%, or 99% sequence identity to the amino acid sequence of SEQ ID NO: 63.

[0216] In some embodiments, the IL-12 cytokine or functional fragment thereof comprises the amino acid sequence of SEQ ID NO: 64. In some embodiments, the IL-12 cytokine or functional fragment thereof comprises an amino acid sequence having about or at least about 85%, 86%, 87%, 88%, 89%, 90%, 91%, 92%, 93%, 94% 95%, 96%, 97%, 98%, or 99% sequence identity to the amino acid sequence of SEQ ID NO: 64.

[0217] 1.2 Masking Moieties

[0218] Provided herein is a masking moiety for use in a masked cytokine. It will be understood that the masking moiety is cleaved from the masked cytokine to form the cleavage product thereof. The masking moiety masks the IL-12 cytokine or functional fragment thereof in the masked cytokine thereby reducing or preventing binding of the IL-cytokine or functional fragment thereof to its cognate receptor.

[0219] The IL-12 receptor, beta 1, or IL-12Rβ1 is a subunit of the IL-12 receptor complex. IL-12Rβ1 is also known as CD212. This protein binds to interleukin-12 (IL-12) with a low affinity. This protein forms a disulfide-linked oligomer, which is required for its IL-12 binding activity. The IL-12 receptor, beta 2, or IL-12Rβ2 is a subunit of the IL-12 receptor complex. The coexpression of IL-12Rβ1 and IL-12Rβ2 protein has been shown to lead to the formation of high-affinity IL-12 binding sites.

[0220] Methods for determining the extent of binding of a protein (e.g., cytokine) to a cognate protein (e.g., cytokine receptor) are well known in the art.

[0221] In some embodiments, the masking moiety comprises an extracellular domain of an IL-12 cytokine receptor, or a subunit or functional fragment thereof.

[0222] Interleukin-12 receptor subunit beta-1, also called CD212 has the sequence:

MEPLVTWVVPLLFLFLLSRQGAACRTSECCFQDPPYPDADSGSASGPRDLRCYRISSDRY
ECSWQYEGPTAGVSHFLRCCLSSGRCCYFAAGSATRLQFSDQAGVSFLYTVTLWVESWAR
NQTEKSPEVTLQLYNSFKYEPPLGDIKVSKLAGQLRMEWETPDNOVGAEVQFRHRTPSSP
WKLGDCGPQDDDTESCLCPLEMNVAQEFQIPRRQLGSQGSSWSKWSSPVCVPPENPPQPQ
VRFSVEQLGQDGRRRLTLKEQPTQLELPEGCQGLAPGTEVTYRLQLHMLSCPCKAKATRT
LHLGKMPYLSGAAYNVAVISSNQFGPGLNQTWHIPADTHTEPVALNISVGTNGTTMYWPA
RAQSMTYCIEWQPVGQDGGLATCSLTAPQDPDPAGMATYSWSRESGAMGQEKCYYITIFA
SAHPEKLTLWSTVLSTYHFGGNASAAGTPHHVSVKNHSLDSVSVDWAPSLLSTCPGVLKE
YVVRCRDEDSKQVSEHPVQPTETQVTLSGLRAGVAYTVQVRADTAWLRGVWSQPQRFSIE
VQVSDWLIFEASLGSFLSILLVGVLGYLGL

[symbol]

[symbol]

[symbol]

[symbol]

[symbol]

[symbol]

[symbol]

[0223] Interleukin-12 receptor subunit beta-2 has the sequence:

MAHTFRGCSLAFMFIITWLLIKAKIDACKRGDVTVKPSHVILLGSTVNITCSLKPRQGCF
HYSRRNKLILYKFDRRINFHHGHSLNSQPTGLPLGTTLFVCKLACINSDEIQICGAEIFV
GVAPEQPQNLSCIQKGEQGTVACTWERGRDTHLYTEYTLQLSGPKNLTWQKQCKDIYCDY
LDFGINLTPESPESNFTAKVTAVNSLGSSSSLPSTFTFLDIVRPLPPWDIRIKFQKASVS
RCTLYWRDEGLVLLNRLRYRPSNSRLWNMVNVTKAKGRHDLLDLKPFTEYEFQISSKLHL
YKGSWSDWSESLRAQTPEEEPTGMLDVWYAYKRHIDYSRQQISLFWKNLSVSEARGKILHY
QVTLQELTGGKAMTQNITGHTSWTTVIPRTGNWAVAVSAANSKGSSLPTRINIMNLCEAG
LLAPRQLSANSEGMDNILVTWQPPRKDPSAVQEYVVEWRELHPGGDTQVPLNWLRSRPYN
VSALISENIKSYICYEIRVYALSGDQGGCSSTLGNSKHKAPLSGPHINAITEEKGSILIS
WNSIPVQEQMGCLLHYRIYWKERDSNSQPQLCEIPYRVSQNSHPINSLQPRVTYVLWMTA
LTAAGESSHGNEREFCLQGKANWMAFVAPSICIAIIMVGIFST

[symbol]

[symbol]

[symbol]

[symbol]

[symbol]

[symbol]

[symbol]

[symbol]

[symbol]

[symbol]

[symbol]

[symbol]

[symbol]

[symbol]

[symbol]

[0224] The bold indicates the pro-peptide, the italics with underline indicates the extracellular domain, the italics indicates the transmembrane domain and the bold with underline indicates the cytoplasmic domain.

[0225] In some embodiments, the masking moiety comprises the extracellular domain of human IL-12Rβ1 or a fragment, portion, or variant thereof that retains or otherwise demonstrates an affinity to IL-12.

[0226] In some embodiments, the masking moiety comprises an amino acid sequence having an amino acid.

[0227] sequence of human IL-12Rβ1 with one to four amino acid substitutions. In some embodiments, the masking moiety comprises an amino acid sequence having an amino acid sequence of human IL-12Rβ1 with one or two amino acid substitutions.

[0228] In some embodiments, the masking moiety comprises residues 24 to 237 of human IL-12Rβ1, namely a sequence having SEQ ID NO: 5 or a fragment, portion, or variant thereof that retains or otherwise demonstrates an affinity to IL-12. In some embodiments, the masking moiety comprises IL-12Rβ1 having SEQ ID NO: 5. In some embodiments, the masking moiety comprises an amino acid sequence having about or at least about 85%, 86%, 87%, 88%, 89%, 90%, 91%, 92%, 93%, 94%, 95%, 96%, 97%, 98%, or 99% sequence identity to any one of the amino acid sequence of SEQ ID NO: 5. In some embodiments, the masking moiety comprises an amino acid sequence having the amino acid sequence of SEQ ID NO: 5 with one to four amino acid substitutions. In some embodiments, the masking moiety comprises an amino acid sequence having the amino acid sequence of SEQ ID NO: 5 with one or two amino acid substitutions.

[0229] In some embodiments, the masking moiety comprises residues 24 to 545 of human IL-12Rβ1, namely a sequence having SEQ ID NO: 6 or a fragment, portion, or variant thereof that retains or otherwise demonstrates an affinity to IL-12. In some embodiments, the masking moiety comprises IL-12Rβ1 having SEQ ID NO: 6. In some embodiments, the masking moiety comprises an amino acid sequence having about or at least about 85%, 86%, 87%, 88%, 89%, 90%, 91%, 92%, 93%, 94%, 95%, 96%, 97%, 98%, or 99% sequence identity to any one of the amino acid sequence of SEQ ID NO: 6. In some embodiments, the masking moiety comprises an amino acid sequence having the amino acid sequence of SEQ ID NO: 6 with one to four amino acid substitutions. In some embodiments, the masking moiety comprises an amino acid sequence having the amino acid sequence of SEQ ID NO: 6 with one or two amino acid substitutions.

[0230] In some embodiments, the masking moiety comprises the extracellular domain of human IL-12Rβ2 or a fragment, portion, or variant thereof that retains or otherwise demonstrates an affinity to IL-12. In some embodiments, the masking moiety comprises an amino acid sequence having an amino acid sequence of human IL-12Rβ2 with one to four amino acid substitutions. In some embodiments, the masking moiety comprises an amino acid sequence having an amino acid sequence of human IL-12Rβ2 with one or two amino acid substitutions.

[0231] In some embodiments, the masking moiety comprises residues 24 to 212 of human IL-12Rβ2, namely a sequence having SEQ ID NO: 7. In some embodiments, the masking moiety comprises an amino acid sequence having about or at least about 85%, 86%, 87%, 88%, 89%, 90%, 91%, 92%, 93%, 94%, 95%, 96%, 97%, 98%, or 99% sequence identity to any one of the amino acid sequence of SEQ ID NO: 7. In some embodiments, the masking moiety comprises an amino acid sequence having the amino acid sequence of SEQ ID NO: 7 with one to four amino acid substitutions. In some embodiments, the masking moiety comprises an amino acid sequence having the amino acid sequence of SEQ ID NO: 7 with one or two amino acid substitutions.

[0232] In some embodiments, the masking moiety comprises residues 24 to 222 of human IL-12Rβ2, namely a sequence having SEQ ID NO: 8. In some embodiments, the masking moiety comprises an amino acid sequence having about or at least about 85%, 86%, 87%, 88%, 89%, 90%, 91%, 92%, 93%, 94%, 95%, 96%, 97%, 98%, or 99% sequence identity to any one of the amino acid sequence of SEQ ID NO: 8. In some embodiments, the masking moiety comprises an amino acid sequence having the amino acid sequence of SEQ ID NO: 8 with one to four amino acid substitutions. In some embodiments, the masking moiety comprises an amino acid sequence having the amino acid sequence of SEQ ID NO: 8 with one or two amino acid substitutions.

[0233] In some embodiments, the masking moiety comprises residues 24 to 319 of human IL-12Rβ2, namely a sequence having SEQ ID NO: 9. In some embodiments, the masking moiety comprises an amino acid sequence having about or at least about 85%, 86%, 87%, 88%, 89%, 90%, 91%, 92%, 93%, 94%, 95%, 96%, 97%, 98%, or 99% sequence identity to any one of the amino acid sequence of SEQ ID NO: 9. In some embodiments, the masking moiety comprises an amino ac id sequence having the amino acid sequence of SEQ ID NO: 9 with one to four amino acid substitutions. In some embodiments, the masking moiety comprises an amino acid sequence having the amino acid sequence of SEQ ID NO: 9 with one or two amino acid substitutions.

[0234] In some embodiments, the masking moiety comprises residues 24 to 319 of human IL-12Rβ2, namely a sequence having SEQ ID NO: 9, with one or more cysteine substitutions. In some embodiments, the masking moiety comprises residues 24 to 319 of human IL-12Rβ2, namely a sequence having SEQ ID NO: 9, with an amino acid substitution at position C242. In some embodiments, the amino acid substitution is at position C242 is C242S. In some embodiments, the masking moiety comprises an amino acid sequence of SEQ ID NO: 65. In some embodiments, the masking moiety comprises an amino acid sequence having about or at least about 85%, 86%, 87%, 88%, 89%, 90%, 91%, 92%, 93%, 94%, 95%, 96%, 97%, 98%, or 99% sequence identity to the amino acid sequence of SEQ ID NO: 65. In some embodiments, the masking moiety consists of an amino acid sequence of SEQ ID NO: 65. In some embodiments, the masking moiety comprises residues 24 to 622 of human IL-12Rβ2, namely a sequence having SEQ ID NO: 10. In some embodiments, the masking moiety comprises an amino acid sequence having about or at least about 85%, 86%, 87%, 88%, 89%, 90%, 91%, 92%, 93%, 94%, 95%, 96%, 97%, 98%, or 99% sequence identity to any one of the amino acid sequence of SEQ ID NO: 10. In some embodiments, the masking moiety comprises an amino acid sequence having the amino acid sequence of SEQ ID NO: 10 with one to four amino acid substitutions. In some embodiments, the masking moiety comprises an amino acid sequence having the amino acid sequence of SEQ ID NO: 10 with one or two amino acid substitutions.

[0235] In some embodiments, the masking moiety comprises residues 24 to 227 of human IL-12Rβ2, namely a sequence having SEQ ID NO: 11. In some embodiments, the masking moiety comprises an amino acid sequence having about or at least about 85%, 86%, 87%, 88%, 89%, 90%, 91%, 92%, 93%, 94%, 95%, 96%, 97%, 98%, or 99% sequence identity to any one of the amino acid sequence of SEQ ID NO: 11. In some embodiments, the masking moiety comprises an amino acid sequence having the amino acid sequence of SEQ ID NO: 11 with one to four amino acid substitutions. In some embodiments, the masking moiety comprises an amino acid sequence having the amino acid sequence of SEQ ID NO: 11 with one or two amino acid substitutions.

[0236] 1.3 Linkers

[0237] Provided herein are linkers for use in a masked cytokine or cleavage product thereof. A tinker as provided herein refers to a peptide of two snore amino acids that is used to link two functional components together in the masked cytokines described herein.

[0238] The masked cytokine comprises a first linker and a second linker, where one of the first linker or the second linker comprises a proteolytically clearable peptide.

[0239] In some embodiments, the second linker comprises a proteolytically cleavable peptide (linker herein referred to as a ‘proteolytically cleavable linker’) and the first linker does not comprise a proteolytically cleavable peptide (linker herein referred to as a ‘non-proteolytically cleavable linker’) such that the first polypeptide chain comprises:

N′ HL1-non-cleavable L1-MM C′

[0240] and the second polypeptide chain comprises

N′ HL2cleavable L2-C C′

[0241] In some embodiments, the first linker comprises a proteolytically cleavable peptide (linker herein referred to as a ‘proteolytically cleavable linker’ or ‘cleavable linker’) and the second linker does not comprise a proteolytically cleavable peptide (linker herein referred to as a ‘non-proteolytically cleavable linker’ or ‘non-cleavable linker’) such that the first polypeptide chain comprises:

N′ HL1-cleavable L1-MM C′

[0242] and the second polypeptide chain comprises

N′ HL2-non-cleavable L2-C C′

[0243] The non-cleavable linkers and cleavable linkers of some embodiments are described in more detail below.

[0244] 1.3.1 Non-Proteolytically Cleavable Linkers

[0245] In some embodiments, the non-cleavable linker is between 3 and 18 amino acids in length.

[0246] In some embodiments, the non-clearable linker is between 3 and 15 amino acids in length.

[0247] In some embodiments, the non-cleavable linker is rich in amino acid residues G and S.

[0248] In some embodiments, the non-cleavable linker only includes amino acid residue types selected from the group consisting of G and S.

[0249] In some embodiments, the non-cleavable linker includes [(G)ₙS], where n=4 or 5.

[0250] In some embodiments, the non-cleavable linker comprises an amino acid sequence as shown in SEQ ID NO: 12 (GGGGS).

[0251] In some embodiments, the non-cleavable linker comprises an amino acid sequence as shown in SEQ ID NO: 13 (GGGGSGGGGS).

[0252] In some embodiments, the non-cleavable linker comprises an amino acid sequence as shown in SEQ ID NO: 14 (GGSGGGSGGGGGS).

[0253] In some embodiments, the non-cleavable linker comprises an amino acid sequence as shown in SEQ ID NO: 54 (GGSGGSGGSGGSGGSSGP).

[0254] In some embodiments, the non-cleavable linker comprises an amino acid sequence as shown in SEQ ID NO: 55 (PGGSGP).

[0255] In some embodiments, the non-cleavable linker comprises an amino acid sequence as shown in SEQ ID NO: 56 (GGSPG).

[0256] In some embodiments, wherein the second tinker comprises a proteolytically cleavable peptide such the second linker is a proteolytically cleavable linker and the first linker does not comprise a proteolytically cleavable peptide such that the first linker is a non-proteolytically cleavable linker, the non-cleavable linker is between 3 and 18 amino acids in length. In some embodiments, the non-cleavable linker comprises an amino acid sequence as shown in SEQ ID NO: 12 (GGGGS). In some embodiments, the non-cleavable linker comprises an amino acid sequence as shown in SEQ ID NO: 13 (GGGGSGGGGS). In some embodiments, the non-cleavable linker comprises an amino acid sequence as shown in SEQ ID NO: 14 (GGSGGGSGGGGGS). Int some embodiments, the non-cleavable linker comprises an amino acid sequence as shown in SEQ ID NO: 54 (GGSGGSGGSGGSGGSSGP). In some embodiments, the non-cleavable linker comprises an amino acid sequence as shown in SEQ ID NO: 55 (PGGSGP). In some embodiments, the non-cleavable linker comprises an amino acid sequence as shown in SEQ ID NO: 56 (GGSPG).

[0257] In some embodiments, it is desirable for the first and second polypeptide chains to be of the same or a similar length to facilitate the first half life extension domain associating with the second half life extension domain and the masking moiety masking the IL-12 cytokine or functional fragment thereof in the assembled construct. As such where the masking moiety is a shorter amino acid sequence than the IL-12 cytokine or functional fragment thereof, the difference in length may be compensated fully or in part by using a longer linker L1.

[0258] 1.3.2 Proteolytically Cleavable Linkers

[0259] In some embodiments, the cleavable linker is from 10 to 25 amino acids in length.

[0260] In some embodiments, the cleavable linker comprises a proteolytically cleavable peptide (CP) flanked on both sides by a spacer domain (SD) as shown below:

SD-CP-SD

[0261] Cleavable Peptides

[0262] The cleavable linker comprises a cleavable peptide.

[0263] A cleavable peptide is a polypeptide that includes a protease cleavage site, such that the cleavable peptide is proteolytically cleavable. Proteases are enzymes that cleave and hydrolyse the peptide bonds between two specific amino acid residues of target substrate proteins. A “cleavage site” as used herein refers to a recognizable site for cleavage of a portion of the cleavable peptide found in any of the linkers that comprise a cleavable peptide described herein. Thus, a cleavage site may be found in the sequence of a cleavable peptide as described herein. In some embodiments, the cleavage site is an amino acid sequence that is recognized and cleaved by a cleaving agent.

[0264] In some embodiments, the protease cleavage site is a tumor-associated protease cleavage site, A “tumor-associated protease cleavage site” as provided herein is an amino acid sequence recognized by a protease whose expression is specific or upregulated for a tumor cell or tumor cell environment thereof.

[0265] The tumor cell environment is complex and can comprise multiple different proteases. As such, the precise site at which a given cleavable peptide will be cleaved in the tumor cell environment may vary between tumor types, between patients with the same tumor type and even between cleavage products formed in the same tumor dependent on the specific tumor cell environment. Moreover, even after cleavage, further modification of the initial cleavage product, e.g. by removal of one or two terminal amino acids, may occur by the further action of proteases in the tumor cell environment. A distribution of cleavage products can thus be expected to form in the tumor cell environment of a patient following administration of a single structure of a masked cytokine as described herein.

[0266] It will be understood that a cleavage site as referred to herein refers to a site between two specific amino acid residues within the cleavable peptide that are a target for a protease known to he associated with a tumor cell environment. In this sense, there may be more than one cleavage site present in a cleavable peptide as described herein where different proteases cleave the cleavable peptide at different cleavage sites. It is also possible that more than one protease may act on the same cleavage site within a cleavable peptide. Discussion of protease cleavage sites can be found in the art.

[0267] Thus, the cleavable peptides disclosed herein may be cleaved by one or more proteases.

[0268] In some embodiments, the cleavable peptide is a substrate for a protease that is co-localized in a region or a tissue expressing the IL-12 cytokine receptor.

[0269] In some embodiments, the cleavable peptide is a 5-mer (i.e. peptide 5 amino acids in length), 6-mer (i.e. peptide 6 amino acids in length), 7-mer (i.e. peptide 7 amino acids in length), 8-mer (i.e. peptide 8 amino acids in length), 9-mer (i.e. peptide 9 amino acids in length), 10-mer (i.e. peptide 10 amino acids in length), 11-mer (i.e. peptide 11 amino acids in length), 12-mer (i.e. peptide 12 amino acids in length), 13-mer (i.e. peptide 13 amino acids in length), 14-mer peptide 14 amino acids in length), 15-mer (i.e. peptide 15 amino acids in length), 16-mer (i.e. peptide 16 amino acids in length), 17-mer (i.e. peptide 17 amino acids in length), or 18-mer (i.e. peptide 18 amino acids in length).

[0270] In some embodiments, the cleavable peptide is from 5 to 18 amino acids in length. In some embodiments, the cleavable peptide is from 6 to 10 amino acids in length.

[0271] In some embodiments, the cleavable peptide within the cleavable linker comprises an amino acid sequence selected from the group consisting of:

Sequence
(* indicates a cleavage site
within the cleavable peptide)
MPYD*LYHP
DSGG*FMLT
HEQ*LTV
RAAA*VKSP
VPLS*LY
ISSGLL*SGRS
DLLA*VVAAS

[0272] Purely by way of example, in the above table, * indicates a known or observed protease cleavage site within the cleavable peptide.

[0273] In some embodiments, the cleavable peptide comprises an amino acid sequence of SEQ ID NO: 15. (VPLS*LY), for example the cleavable peptide may comprise an amino acid sequence of SEQ ID NO: 210 (VPLSLYSG). In some embodiments, the cleavable peptide comprises an amino acid sequence of SEQ ID NO: 41. (MPYD*LYHP). In some embodiments, the cleavable peptide comprises an amino acid sequence of SEQ ID NO: 42. (DSGG*FMLT). In some embodiments, the cleavable peptide comprises an amino acid sequence of SEQ ID NO: 4:3. (RAAA*VKSP). in some embodiments, the cleavable peptide comprises an amino acid sequence of SEQ ID NO: 44. (ISSGLL*SGRS), for example the cleavable peptide may comprise an amino acid sequence of SEQ ID NO: 211 (ISSGLLSGRSDQP). In some embodiments, the cleavable peptide comprises an amino acid sequence of SEQ ID NO: 45. (DLLA*VVAAS).

[0274] In some embodiments, the cleavable peptide consists of an amino acid sequence of SEQ ID NO: 15. (VPLS*LY). In some embodiments, the cleavable peptide consists of an amino acid sequence of SEQ NO: 210 (VPLSLYSG). In some embodiments, the cleavable peptide consists of an amino acid sequence of SEQ ID NO: 41. (MPYD*LYHP). In some embodiments, the cleavable peptide consists of an amino acid sequence of SEQ ID NO: 42. (DSGG*FMLT). In some embodiments, the cleavable peptide consists of an amino acid sequence of SEQ ID NO: 43. (RAAA*VKSP). In some embodiments, the cleavable peptide consists of an amino acid sequence of SEQ ID NO: 44. (ISSGLL*SGRS). In some embodiments, the cleavable peptide consists of an amino acid sequence of SEQ ID NO: 21 (ISSGLLSGRSDQP). In some embodiments, the cleavable peptide consists of an amino acid sequence of SEQ ID NO: 45. (DLLA*VVAAS).

[0275] Cleavable peptides having an amino acid sequence as shown in SEQ ID NOs: 44 or 45 have been found to demonstrate very specific cleavage in the tumor cell environment compared to non-tumor cell environment. Thus, when these cleavable peptides are incorporated into a masked IL-12 cytokine as disclosed anywhere herein, any systemic side effects of the administered IL-12 cytokine or functional fragment thereof may be further reduced.

[0276] Spacer Domains

[0277] A spacer domain may consist of one or more amino acids. The function of the spacer domains, where present, is to link the proteolytically cleavable peptide (CP) to the other functional components in the constructs described herein.

[0278] It will be understood that spacer domains do not alter the biological interaction of the proteolytically cleavable peptide with proteases in the tumor-cell environment or in non-tumor cell environment. In other words, even in the presence of spacer domains the inventive proteolytically cleavable peptides disclosed herein retain their advantageous tumor specificity.

[0279] In some embodiments, the spacer domains flanking the proteolytically cleavable peptide are different.

[0280] In some embodiments, the spacer domains are rich in amino acid residues G, S and P.

[0281] In some embodiments, the spacer domains only includes amino acid residue types selected from the group consisting of G, S and P.

[0282] In some embodiments, the cleavable linker comprises:

N′ SD1-CP-SD2 C′

[0283] where SD1 is a first spacer domain and SD2 is a second spacer domain.

[0284] In some embodiments, the cleavable linker comprises:

N′ SD1-CP-SD2 C′

[0285] In some embodiments, the first polypeptide chain comprises:

N′ HL1-non-cleavable L1-MM C′

[0286] and the second polypeptide chain comprises:

N′ HL2-SD1-CP-SD2-C C′

[0287] In some embodiments, the first polypeptide chain comprises:

N′ HL1-SD1-CP-SD2-MM C′

[0288] and the second polypeptide chain comprises:

N′ HL2-non-cleavable L2-C C′

[0289] In some embodiments, the N-terminus of SD1 is a glycine (G).

[0290] In some embodiments, the first spacer domain (SD1) is between 3 and 10 amino acids in length. In some embodiments, the first spacer domain (SD1) is between 5 and 9 amino acids in length.

[0291] In some embodiments, SD1 comprises SEQ ID NO: 16. (GGSGGS)

[0292] In some embodiments, SD1 comprises SEQ ID NO: 17. (GGSGGSGGS)

[0293] In some embodiments, the C-terminus sequence of SD2 is -GP C′.

[0294] In some embodiments, the second spacer domain (SD2) is between 3 and 6 amino acids in length.

[0295] In some embodiments, SD2 comprises SEQ ID NO: 18. (SGP)

[0296] Exemplary combinations of SD1 and SD2 in a cleavable linker are shown below:

| Linker structure | SD1 sequence | SD2 sequence |
|---|---|---|
| SD1-CP-SD2 | GGSGGS | SGP |
| SD1-CP-SD2 | GGSGGSGGS | SGP |

[0297] In some embodiments, the proteolytically cleavable linker comprises SD1-CP-SD2 where ST1 is a first spacer domain, CP is a cleavable peptide and SD2 is a second spacer domain, and wherein CP has an amino acid sequence as shown in SEQ ID NO: 44. In some embodiments, the spacer domains are rich in amino acid residues G, S and P. In some embodiments, the spacer domains only include amino acid residue types selected from the group consisting of G, S and P.

[0298] In some embodiments, the proteolytically cleavable linker comprises SD1-CP-SD2 where SD1 is a first spacer domain, CP is a cleavable peptide and SD2 is a second spacer domain, and wherein CP has an amino acid sequence as shown in SEQ ID NO: 45. In some embodiments, the spacer domains are rich in amino acid residues G, S and P. In some embodiments, the spacer domains only include amino acid residue types selected from the group consisting of G, S and P.

[0299] In some embodiments, the proteolytically cleavable linker comprises SD1-CP-SD2 where SD1 is a first spacer domain, CP is a cleavable peptide and SD2 is a second spacer domain, and wherein CP has an amino acid sequence as shown in SEQ ID NO: 44 and SD2 has an amino acid sequence as shown in SEQ ID NO: 18. In some embodiments, the SD1 is from 3 to 6 amino acids in length. In some embodiments, the spacer domains are rich in amino acid residues G, S and P. In some embodiments, the spacer domains only include amino acid residue types selected front the group consisting of G, S and P.

[0300] In some embodiments, the proteolytically cleavable linker comprises SD1-CP-SD2 where SD1 is a first spacer domain, CP is a cleavable peptide and SD2 is a second spacer domain, and wherein CP has an amino acid sequence as shown in SEQ ID NO: 45 and SD2 has an amino acid sequence as shown in SEQ ID NO: 8. In some embodiments, the SD1 is from 3 to 6 amino acids in length. In some embodiments, wherein the spacer domains are rich in amino acid residues G, S and P. In some embodiments, the spacer domains only include amino acid residue types selected from the group consisting of G, S and P.

[0301] In some embodiments, the cleavable linker comprises SEQ ID NO: 19. (GGSGGSVPLSLYSGP)

[0302] In some embodiments, the cleavable linker comprises SEQ ID NO: 20. (GGSGGSGGSVPLSLYSGP)

[0303] In some embodiments, the cleavable linker comprises SEQ ID NO: 46. (GGSGGSMPYDLYHPSGP)

[0304] In some embodiments, the cleavable linker comprises SEQ ID NO: 47.

(GGSGGSGGSMPYDLYHPSGP)

[0305] In some embodiments, the cleavable linker comprises SEQ ILD NO: 48. (GGSGGSDSGGFMLTSGP)

[0306] In some embodiments, the cleavable linker co rises SEQ ID NO: 49.

(GGSGGSGGSDSGGFMLTSGP)

[0307] In some embodiments, the cleavable linker comprises SEQ ID NO: 50. (GGSGGSRAAAVKSPSGP)

[0308] In some embodiments, the cleavable linker comprises SEQ ID NO: 51.

(GGSGGSGGSRAAAVKSPSGP)

[0309] In some embodiments, the cleavable linker comprises SEQ ID NO: 52. (GGSGGSISSGLLSGRSSGP)

[0310] In some embodiments, the cleavable linker comprises SEQ ID NO: 3.

(GGSGGSGGSISSGLLSGRSSGP).

[0311] In some embodiments, the non-cleavable linker comprises an amino acid sequence as shown in SEQ ID NO: 12 (GGGGS) and the cleavable linker comprises SEQ ID NO: 19 (GGSGGSVPLSLYSGP).

[0312] In some embodiments, the non-cleavable linker comprises an amino acid sequence as shown in SEQ ID NO: 13 (GGGGSGGGGS) and the cleavable linker comprises SEQ ID NO: 19 (GGSGGSVPLSLYSGP).

[0313] In some embodiments, the non-cleavable linker comprises an amino acid sequence as shown in SEQ ID NO: 14 (GGSGGGSGGGGGS) and the cleavable linker comprises SEQ ID NO: 19 (GGSGGSVPLSLYSGP).

[0314] In some embodiments, the non-cleavable linker comprises an amino acid sequence as shown in SEQ ID NO: 12 (GGGGS) and the cleavable linker comprises SEQ ID NO: 20 (GGSGGSGGSVPLSLYSGP).

[0315] In some embodiments, the non-cleavable tinker comprises an amino acid sequence as shown in SEQ ID NO: 13 (GGGGSGGGGS) and the cleavable linker comprises SEQ ID NO: 20 (GGSGGSGGSVPLSLYSGP).

[0316] In some embodiments, the non-cleavable linker comprises an amino acid sequence as shown in SEQ ID NO: 14 (GGSGGGSGGGGGS) and the cleavable linker comprises SEQ ID NO: 20 (GGSGGSGGSVPLSLYSGP),

[0317] In some embodiments, wherein the second linker comprises a proteolytically cleavable peptide such that the second linker is a proteolytically cleavable linker and the first linker does not comprise a proteolytically cleavable peptide such that the first linker is a non-proteolytically cleavable linker, the cleavable linker comprises SEQ ID NO: 46 and the non-cleavable linker comprises SEQ ID NO: 55. In some embodiments, the cleavable linker comprises SEQ ID NO: 47 and the non-cleavable linker comprises SEQ ID NO: 55. In some embodiments, the cleavable linker comprises SEQ ID NO: 48 and the non-cleavable linker comprises SEQ ID NO: 55. In some embodiments, the cleavable linker comprises SEQ ID NO: 49 and the non-cleavable linker comprises SEQ ID NO: 56. In some embodiments, the cleavable linker comprises SEQ ID NO: 50 and the non-cleavable linker comprises SEQ ID NO: 55. In some embodiments, the cleavable linker comprises SEQ ID NO: 50 and the non-cleavable linker comprises SEQ ID NO: 14. In some embodiments, the cleavable linker comprises SEQ ID NO: 51 and the non-cleavable linker comprises SEQ ID NO: 56. In some embodiments, the cleavable linker comprises SEQ ID NO: 51 and the non-cleavable linker comprises SEQ ID NO: 14. In some embodiments, the cleavable linker comprises SEQ ID NO: 52 and the non-cleavable linker comprises SEQ ID NO: 55, In some embodiments, the cleavable linker comprises SEQ ID NO: 52 and the non-cleavable linker comprises SEQ ID NO: 14. In some embodiments, the cleavable linker comprises SEQ ID NO: 53 and the non-cleavable linker comprises SEQ ID NO: 56. In some embodiments, the cleavable linker comprises SEQ ID NO: 53 and the non-cleavable linker comprises SEQ ID NO: 14.

[0318] In some embodiments, the proteolytically cleavable linker comprises a cleavable peptide consisting of an amino acid sequence of SEQ IU NO: 44. (ISSGLL*SGRS).

[0319] In some embodiments, the proteolytically cleavable linker comprises a cleavable peptide consisting of an amino acid sequence of SEQ ID NO: 45. (DLLA*VVAAS).

[0320] Linker combinations disclosed herein and disclosed in exemplary AK molecules may be used with any IL-12 cytokine or fragment thereof disclosed herein. Linker combinations disclosed herein and disclosed in exemplary AK molecules may be used with any masking moiety disclosed herein. Linker combinations disclosed herein and disclosed in exemplary AK molecules may be used with any half-life extension domains. In other words, the linkers disclosed in exemplary AK molecules may be used in combinations with any IL-12 cytokine or fragment thereof disclosed herein, masking moiety disclosed herein and/or half-life extension domain disclosed herein.

[0321] 1.4 Half-Life Extension Domains

[0322] Provided herein are half life extension domains for use in a masked cytokine or cleavage product thereof. A long half-life in vivo is important for therapeutic proteins. Unfortunately, cytokines that are administered to a subject generally have a short half-life since they are normally cleared rapidly from the subject by mechanisms including clearance by the kidney and endocytic degradation. Thus, in the masked cytokine provided herein, a half-life extension domain is linked to the masked cytokine for the purpose of extending the half-life of the cytokine in vivo.

[0323] The term “half-life extension domain” refers to a domain that extends the half-life of the target component in serum. The term “half-life extension domain” encompasses, for example, antibodies and antibody fragments.

[0324] The masked cytokine provided herein comprises a first half-life extension domain that is associated with a second half-life extension domain.

[0325] In some embodiments, the first half-life extension domain and the second half-life extension domain are non-covalently associated.

[0326] In some embodiments, the first half-life extension domain and the second half-life extension domain are covalently bound.

[0327] In some embodiments, the first half-life extension domain is linked to the second half-life extension domain via one or more disulphide bonds.

[0328] In some embodiments, the first half-life extension domain is linked to the second half-life extension domain via a half life extension domain linker (HLDL).

[0329] In some embodiments, the first half-life extension domain and the second half-life extension domain are non-covalently associated and, further, the first half-life extension domain is linked to the second half-life extension domain via a disulphide bond.

[0330] In some embodiments, the first half-life extension domain comprises a first antibody or fragment thereof, and second half-life extension domain comprises a second antibody or fragment thereof.

[0331] An antibody or fragment thereof that is capable of FcRn-mediated recycling, can be reduce or otherwise delay clearance of the masked cytokine from a subject, thereby prolonging the half-life of the administered masked cytokine. In some embodiments, the antibody or fragment thereof is any antibody or fragment thereof that is capable of FcRn-mediated recycling, such as any heavy chain polypeptide or portion thereof (e.g., Fc domain or fragment thereof) that is capable of FcRn-mediated recycling.

[0332] The antibody or fragment thereof can be any antibody or fragment thereof. However, in some embodiments of a masked cytokine comprising a first half-life extension domain and a second half-life extension domain, either the first half-life extension domain or the second half-life extension domain may comprise an antibody or fragment thereof that does not bind to the FcRn receptor, such as a light chain polypeptide. For example, in some embodiments of the masked cytokine, a first half-life extension domain comprises an antibody or fragment thereof that comprises a light chain polypeptide or portion thereof that does not directly interact with the FcRn receptor, but the masked cytokine nonetheless has an extended half-life due to comprising a second half-life extension domain that is capable of interacting with the FcRn receptor, such as by comprising a heavy chain polypeptide. It is recognized in the art that FcRn-mediated recycling requires binding of the FcRn receptor to the Fc region of the antibody or fragment thereof. For instance, studies have shown that residues I253, S254, H435, and Y436 (numbering according to the Kabat EU index numbering system) are important for the interaction between the human Fc region and the human FcRn complex. See, e.g., Firan, M., et al., Int. Immunol. 13 (2001) 993-1002; Shields, R. L., et al, J. Biol. Chem. 276 (200) 6591-6604). Various mutants of residues 248-259, 301-317, 376-382, and 424-437 (numbering according to the Kabat EU index numbering system) have also been examined and reported. Yeung, Y. A., et al. (J. Immunol. 182 (2009) 7667-7671.

[0333] In some embodiments, the antibody or fragment thereof comprises either a heavy chain polypeptide or a light chain polypeptide. In some embodiments, the antibody or fragment thereof comprises a portion of either a heavy chain polypeptide or a light chain polypeptide. In some embodiments, the antibody or fragment thereof comprises an Fc domain or fragment thereof. In some embodiments, the antibody or fragment thereof comprises a CH2 and CH3 domain or a fragment thereof. In some embodiments, the antibody or fragment thereof comprises the constant domain of the heavy chain polypeptide. In some embodiments, the antibody or fragment thereof comprises the constant domain of the light chain polypeptide. In some embodiments, the antibody or fragment thereof comprises a heavy chain polypeptide or fragment thereof (e.g., an Fc domain or fragment thereof). In some embodiments, the antibody or fragment thereof comprises a light chain polypeptide.

[0334] In some embodiments, the first half-life extension domain comprises a first Fc domain or a fragment thereof and the second half-life extension domain comprises a second Fc domain or a fragment thereof.

[0335] In some embodiments, the first and/or second Fc domains each contain one or more modifications that promote the non-covalent association of the first and the second half-life extension domains. In some embodiments, the first half-life extension domain comprises an IgG1 Fc domain or fragment thereof including the mutations Y349C; T366S; L38A; and Y407V to form a ‘hole’ in the first half-life extension domain and the second half-life extension domain comprises an IgG1 Fc domain or fragment thereof including the mutations S354C and T366W to form the ‘knob’ in the second half-life extension domain.

[0336] In some embodiments, the first and second half-life extension domains are each an IgG1, IgG2 or IgG4 Fc domain or fragment thereof. In some embodiments, the first and second half-life extension domains are each an IgG1 Fc domain or fragment thereof. Human IgG1 Immunoglobulin heavy constant gamma 1 has the sequence:

(SEQ ID NO: 21)
ASTKGPSVFPLAPSSKSTSGGTAALGCLVKDYFPE
PVTVSWNSGALTSGVHTFPAVLQSSGLYSLSSVVT
VPSSSLGTQTYICNVNHKPSNTKVDKKVEPKSCDK
THTCPPCPAPELLGGPSVFLFPPKPKDTLMISRTP
EVTCWVVDVSHEDPEVKFNWYVDGVEVHNAKTKPR
EEQYNSTYRVVSVLTVLHQDWLNGKEYKCKVSNKA
LPAPIEKTISKAKGQPREPQVYTLPPSRDEITKNQ
VSLTCLVKGFYPSDIAVEWESNGQPENNYKTTPPV
LDSDGSFFLYSKLTVDKSRWQQGNVFSCSVMHEAL
HNHYTQKSLSLSPGK

[0337] In some embodiments, the first and second half-life extension domains are derived from the sequence for human IgG1 immunoglobulin heavy constant gamma 1 having SEQ ID NO: 21 (the ‘parent sequence’), such that the first and second half-life extension domains each comprise SEQ ID NO: 21 or fragment thereof, with one or more amino acid modifications.

[0338] In some embodiments, the first and second half-life extension domains each comprise the portion of SEQ ID NO: 21 shown in bold above, optionally with one or more amino acid modifications, i.e.:

(SEQ ID NO: 22)
DKTHTCPPCPAPELLGGPSVFLFPPKPKDTLMISR
TPEVTCVVVDVSHEDPEVKFNWYVDGVEVHNAKTK
PREEQYNSTYRVVSVLTVLHQDWLNGKEYKCKVSN
KALPAPIEKTISKAKGQPREPQVYTLPPSRDELTK
NQVSLTCLVKGFYPSDIAVEWESNGQPENNYKTTP
PVLDSDGSFFLYSKLTVDKSRWQQGNVFSCSVMHE
ALHNHYTQKSLSLSPG

[0339] In some embodiments, the first and second half-life extension domains comprise SEQ ID NO: 22 with amino substitutions to promote association of the first and second half-life extension domains according to the ‘knob into holes’ approach. In some embodiments, the sequence SEQ ID NO: 22 contains mutations Y349C; T366S; I38A: and Y407V (numbered according to the Kabat EU numbering system) to form the ‘hole’ in the first half-life extension domain and mutations S354C and T366W (numbered according to the Kabat EU numbering system) to form the ‘knob’ in the second half-life extension domain. These modified sequences have SEQ ID NOs 23 and 24 shown below:
[0340] First half-life extension domain (Y349C; T366S; L38 and Y407V) SEQ ID NO 23:

DKTHTCPPCPAPELLGGPSVFLFPPKPKDTLMISR
TPEVTCVVVDVSHEDPEVKFNWYVDGVEVHNAKTK
PREEQYNSTYRVVSVLTVLHQDWLNGKEYKCKVSN
KALPAPIEKTISKAKGQPREPQVCTLPPSRDELTK
NQVSLSCAVKGFYPSDIAVEWESNGQPENNYKTTP
PVLDSDGSFFLVSKLTVDKSRWQQGNVFSCSVMHE
ALHNHYTQKSLSLSPG

[0341] Second half-life extension domain (S354C and T366W) SEQ ID NO 24:

DKTHTCPPCPAPELLGGPSVFLFPPKPKDTLMISR
TPEVTCVVVDVSHEDPEVKFNWYVDGVEVHNAKTK
PREEQYNSTYRVVSVLTVLHQDWLNGKEYKCKVSN
KALPAPIEKTISKAKGQPREPQVYTLPPCRDELTK
NQVSLWCLVKGFYPSDIAVEWESNGQPENNYKTTP
PVLDSDGSFFLYSKLTVDKSRWQQGNVFSCSVMHE
ALHNHYTQKSLSLSPG

[0342] In some embodiments, the first and second half-life extension domains each further comprise amino substitution N297A, numbered according to the Kabat EU numbering system:
[0343] First half-life extension domain (Y349C; T3665; L38A; Y407V and N297A) SEQ ID NO 25:

DKTHTCPPCPAPELLGGPSVFLFPPKPKDTLMISR
TPEVTCVVVDVSHEDPEVKFNWYVDGVEVHNAKTK
PREEQYASTYRVVSVLTVLHQDWLNGKEYKCKVSN
KALPAPDEKTISKAKGQPREPQVCTLPPSRDELTK
NQVSLSCAVKGFYPSDIAVEWESNGQPENNYKTTP
PVLDSDGSFFLVSKLTVDKSRWQQGNVFSCSVMHE
ALHNHYTQKSLSLSPG

[0344] Second half-life extension do (S354C, T366W and N297A) SEQ ID NO 26:

DKTHTCPPCPAPELLGGPSVFLFPPKPKDTLMISR
TPEVTCVVVDVSHEDPEVKFNWYVDGVEVHNAKTK
PREEQYASTYRVVSVLTVLHQDWLNGKEYKCKVSN
KALPAPIEKTISKAKGQPREPQVYTLPPCRDELTK
NQVSLWCLVKGFYPSDIAVEWESNGQPENNYKTTP
PVLDSDGSFFLYSKLTVDKSRWQQGNVFSCSVMHE
ALHNHYTQKSLSLSPG

[0345] In some embodiments, the first and second half-life extension domains each flintier comprise the amino substitution 1253A, numbered according to the Kabat EU numbering system.

[0346] In some embodiments, the first and second half-life extension domains each further comprise both the amino substitutions N297A and I253A, numbered according to the Kabat EU numbering system:
[0347] First half-life extension domain (Y349C; T366S; L38A; Y407V, N297A and I253A) SEQ ID NO 27:

DKTHTCPPCPAPELLGGPSVFLFPPKPKDTLMASR
TPEVTCVVVDVSHEDPEVKFNWYVDGVEVHNAKTK
PREEQYASTYRVVSVLTVLHQDWLNGKEYKCKVSN
KALPAPIEKTISKAKGQPREPQVCTLPPSRDELTK
NQVSLSCAVKGFYPSDIAVEWESNGQPENNYKTTP
PVLDSDGSFFLVSKLTVDKSRWQQGNVFSCSVMHE
ALHNHYTQKSLSLSPG

[0348] Second half-life extension domain (S354C, T366W, N297A and I253A) SEQ ID NO 28:

DKTHTCPPCPAPELLGGPSVFLFPPKPKDTLMASR
TPEVTCVVVDVSHEDPEVKFNWYVDGVEVHNAKTK
PREEQYASTYRVVSVLTVLHQDWLNGKEYKCKVSN
KALPAPIEKTISKAKGQPREPQVYTLPPCRDELTK
NQVSLWCLVKGFYPSDIAVEWESNGQPENNYKTTP
PVLDSDGSFFLYSKLTVDKSRWQQGNVFSCSVMHE
ALHNHYTQKSLSLSPG

[0349] In some embodiments, the first half-life extension domain comprises an amino acid sequence having about or at least about 85%, 86%, 87%, 88%, 89%, 90%, 91%, 92%, 93%, 94%, 95%, 96%. 97%, 98%, or 99% sequence identity to any one of the amino acid sequence of any one of SEQ ID NOs: 22, 23, 25, and 27.

[0350] In some embodiments, the second half-life extension domain comprises an amino acid sequence having about or at least about 85%, 86%, 87%, 88%, 89%, 90%, 91%, 92%, 93%, 94%, 95%, 96%, 97%, 98%, or 99% sequence identity to any one of the amino acid sequence of any one of SEQ ID NOs: 22, 24, 26 and 28.

[0351] In some embodiments, the first half-life extension domain comprises an amino acid sequence having one or more modifications, such as one or more amino acid substitutions, additions, or deletions, as compared to the amino acid sequence of any one of SEQ ID NOs: 22, 23, 25, and 27. In some embodiments, the second half-life extension domain comprises an amino acid sequence having one or more modifications, such as one or more amino acid substitutions, additions, or deletions, as compared to the amino acid sequence of any one of SEQ ID NOs: 22, 24, 26 and 28. The one or more modifications can be any modifications or alterations described herein, including, in some embodiments, any modifications or alterations disclosed herein that promote heterodimetization of polypeptide chains and/or suppresses homodimerization of polypeptide chains, alter effector function, or enhance effector function.

[0352] In some embodiments, the Fc domain or fragment thereof comprises one or more amino acid substitutions altering effector function. In some embodiments, the half-life extension domain is an IgG1 Fc domain or fragment thereof and comprises one or more amino acid substitutions selected from the group consisting of N297A, N297G, N297Q, L234A, L235A, C220S, C226S, C229S, P238S, E233P, L234V, L234F, L235E, P331S, S267E, L328F, D265A, and P329G, numbered according to the Kabat EU numbering system. In some embodiments, the half-life extension domain is an IgG2 Fc domain or fragment thereof and comprises the amino substitution(s): V234A and G237A; H268Q, V309L, A330S, and A331S; and/or V234A, G237A, P238S, H268A, V309L, and A330S, numbered according to the Kabat EU numbering system. In some embodiments, the half-life extension domain is an IgG2 Fc domain or fragment thereof and comprises one or more amino acid substitutions selected from the group consisting of V234A, G237A, H268Q, V309L, A330S, A331S, P238S, H268A, and V309L, numbered according to the Kabat EU numbering system. In some embodiments, the half-life extension domain is an IgG4 Fc domain or fragment thereof and comprises the amino substitution(s): L235A, G237A, and E318A; S228P, L234A, and L235A; H268Q, V309L, A330S, and P331S, and/or S228P and L235A, numbered according to the Kabat EU numbering system. In some embodiments, the half-life extension domain is an IgG2 Fc domain or fragment thereof and comprises one or more amino acid substitutions selected from the group consisting of L235A, G237A, E318A, S228P, L234A, H268Q, V309L, A330S, and P331S, numbered according to the Kabat EU numbering system.

[0353] In some embodiments, the half-life extension domain comprises Fc domain or fragment thereof that comprises one or more amino acid substitutions enhancing effector function. In some embodiments, the half-life extension domain is an IgG1 Fc domain or fragment thereof and comprises the amino acid substitution(s): S298, E33A, and K334A; S239D and I332E; S239D, A330L, and I332E; P247I and A339D or A339Q; D280H and K290S; D280H, K290S, and either S298D or S298V; F243L, R292P, and Y300L; F243L, R292P, Y300L, and P396L; F243L, R292P, Y300L, V305I, and P396L; G236A, S239D, and I332E; K326A and E333A; K326W and E333S; K290E, S298G, and T299A; K290E, S298G, T299A, and K326E; K290N, S298G, and T299A; K290N, S298G, T299A, and K326E; K334V; L235S, S239D, and K334V; K334V and Q331M, S239D, F243V, E294L ,or S298T; E233L, Q311M, and K334V; L234I, Q311M, and K334V; K334V and S298T, A330M, or A330F; K334V, Q311M, and either A330M or A330F; K334V, S298T, and either A330M or A330F; K334V, S239D, and either A330M or S298T; L234Y, Y296W, and K290Y, F243V, or E294L; Y296W and either L234Y or K290Y; S239D, A330S, and I332E, V264I; F243L and V264I; L328M; I332E; L328M and I332E; V264I and I332E; S239E and I332E; S239Q and I332E; S239E; A330Y; I332D; L328I and I332E; L328Q and I332E; V264T; V240I; V266I; S239D; S239D and I332D; S239D and I332N; S239D and I332Q; S239E and I332D; S239E and I332N; S239E and I332Q; S239N and I332D, S239N and I332E; S239Q and I332D; A330Y and I332E; V264I, A330Y, and I332E; A330L and I332E; V264I, A330L, and I332E; L234E, L234Y, or L234I; L235D, L235S, L235Y, or L239I; S239T; V240M; V264Y; A330I; N325T; I332E and L328D, L328V, L328T, or L328I; V264I, I332E, and either S239E or S239Q; S239E, V264I, A330Y, and I332E; A330Y, I332E, and either S239D or S239N; A330L, I332E, and either S239D or S239N; V264I, S298A, and I332E; S298A, I332E, and either S239D or S239N; S239D, V264I, and I332E; S239D, V264I, S298A, and I332E; S239D, V264I, A330L, and I332E; S239D, I332E, and A330I; P230A; P230A, E233D, and I332E; E272Y; K274T, K274E, K274R, K274L, or K274Y; F275W; N276L; Y278T; V302I; E318R; S324D, S324I or S324V; K326I or K326T; T335D, T335R, or T335R; V240I and V266I; S239D, A330Y, I332E, and L234I; S239D, A330Y, I332E, and L235D; S239D, A330Y, I332E, and V240I; S239D, A330Y, I332E, and V264T; and/or S239D, A330Y, I332E, and either K326E or K326T, numbered according to the Kabat EU numbering system. In some embodiments, the half-life extension domain is an IgG1 Fc domain or fragment thereof. and comprises one or more amino acid substitution(s) selected from the group consisting of: P230A, E233D, L234E, L234Y, L234I, L235D, L235S, L235I, L235I, S239D, S239E, S239N, S239Q, S239T, V240I, V240M, F243L, V264I, V264T, V264Y, V266I, E272Y, K274T, K274E, K274R, K274L, K274Y, F275W, N276L, Y278T, V302I, E318R, S324D, S324I, S324V, N325T, K326I, K326T, L328M, L328I, L328Q, L328D, L328V, L328I, A330Y, A330L, A330I, I332D, I332E, I332N, I332Q, T335D, T335R, and T335Y.

[0354] In some embodiments, the half-life extension domain comprises one or more amino acid substitution(s) that enhance binding of the half-life extension domain to FcRn. In some embodiments, the one or more amino acid substitution(s) increase binding affinity of an Fc-containing polypeptide (e.g., a heavy chain polypeptide or an Fc domain or fragment thereof) to FcRn at acidic pH. In some embodiments, the half-life extension domain comprises one or more amino acid substitution(s) selected from the group consisting of M428F; T250Q and M428F; M252Y, S254T, and I256E; P2571 and N434H; D376V and N434H; P257I and Q311I; N434A; N434W; M428F and N434S; V259I and V308F; M252Y, S254T, and T256E; V259I, V308F and M428F; T307Q and N434A; T307Q and N434S; T307Q, E380A, and N434A; V308P and N434A; N434H; and V308P.

[0355] For manufacturing purposes, a signal peptide may be engineered upstream of the half life domain to improve secretion of the protein. The signal peptide is selected according to the cell line's requirements as is known in the art. It will be understood that the signal peptide is not expressed as part of the protein that will he purified and formulated as drug product.

[0356] 1.4.1 Heterodimerization Modifications

[0357] The half-life extension domains described herein may include one or more modifications that promote heterodimerization of two different half-life extension domains. In some embodiments, it is desirable to promote heterodimerization of the first and second half-life extension domains such that production of the masked cytokine in its correct heterodimeric form is produced efficiently. As such, one or more amino acid modifications can be made to the first half-life extension domain and one or more amino acid modifications can he made to the second half-life extension domain using any strategy available in the art, including any strategy as described in Klein et al. (2012), MAbs, 4(6): 653-663. Exemplary strategies and modifications are described in detail below.

[0358] Knobs-Into-Holes Approach

[0359] One strategy for promoting heterodimerization of two different half-life extension domains is an approach termed the “knobs-into-holes”.

[0360] In some embodiments, the masked cytokine comprises a first half-life extension domain and a second half-life extension domain, each of which comprises a CH3 domain. In some embodiments, the half-life extension domain comprising a CH3 domain is a heavy chain polypeptide or a fragment thereof (e.g., an Fc domain or fragment thereof). The CH3 domains of the two half-life extension domains can be altered by the “knobs-into-holes” technology, which is described in detail with several examples in, e.g., WO 1996/027011; Ridgway, J. B. et al, Protein Eng. (1996) 9(7): 617-621; Merchant, A. M., et al, Nat. Biotechnol. (1998) 16(7): 677-681. See also Klein et at. (2012), MAbs, 4(6): 653-663. Using the knob-into-holes method, the interaction surfaces of the two CH3 domains are altered to increase the heterodimerization of the two half-life extension domains containing the two altered CH3 domains. This occurs by introducing a bulky residue into the CH3 domain of one of the half-life extension domains, which acts as the “knob.” Then, in order to accommodate the bulky residue, a “hole” is formed in the other half-life extension domain that can accommodate the knob. Either of the altered CH3 domains can be the “knob” while the other can be the “hole.” The introduction of a disulfide bridge further stabilizes the heterodimers (Merchant, A. M., et al, Nat. Biotechnol. (1998)16(7), Atwell, S., et al, J. Mol. Biol. (1997) 270(1): 26-35) as well as increases yield.

[0361] It has been reported that heterodimerization yields above 97% can be achieved by introducing the S354C and T366W mutations in a heavy chain to create the “knob” and by introducing the Y349C, T366S, L368A, and Y407V mutations in a heavy chain to create the “hole” (numbering of the residues according to the Kabat EU numbering system). Carter et al. (2001), J. Immunol. Methods, 248: 7-15; Klein et al. (2012), MAbs, 4(6): 653-663.

[0362] In some embodiments comprising a first half-life extension domain and a second half-life extension domain, the first half-life extension domain comprises a heavy chain polypeptide or portion thereof (e.g., an Fc domain or fragment thereof) that comprises the amino acid mutations S354C and T366W (numbered according to the Kabat EU numbering system), and the second half-life extension domain comprises a heavy chain polypeptide or portion thereof (e.g., an Fc domain or fragment thereof) that comprises the amino acid mutations Y349C, T366S, L368A, and Y407V (numbered according to the Kabat EU numbering system). In some embodiments comprising a first half-life extension domain and a second half-life extension domain, the first half-life extension domain comprises a heavy chain polypeptide or portion thereof (e.g., an Fc domain or fragment thereof) that comprises the amino acid mutations Y349C, T366S, L368A, and Y407V (numbered according to the Kabat EU numbering system), and the second half-life extension domain comprises a heavy chain polypeptide or portion thereof (e.g., an Fc domain or fragment thereof) that comprises the amino acid mutations S354C and T366W (numbered according to the Kabat EU numbering system).

[0363] Additional examples of substitutions that can be made to form knobs and holes include those described in US20140302037A1, the contents of which are herein incorporated by reference. For example, in some embodiments, any of the following amino acid substitutions can be made to a first half-life extension domain (“first domain”) and a paired second half-life extension domain (“second domain”) that each contain an Fc domain: (a) Y407T in the first domain and T366Y in the second domain; (b) Y407A in the first domain and T366W in the second domain; (c) F405A in the first domain and T394W in the second domain; (d) F405W in the first domain and T394S in the second domain; (e) Y407T in the first domain and T366Y in the second domain; (f) T366Y and F405A in the first domain and 1394W and Y407T in the second domain; (g) T366W and F405W in the first domain and T394S and Y407A in the second domain; F405W and Y407A in the first domain and T366W and T394S in the second domain; or (i) T366W in the first domain and T366S, L368A, and Y407V in the second domain, numbered according to the Kabat EU numbering system.

[0364] In some embodiments, any of the following amino acid substitutions can be made to a first half-life extension domain (“first domain”) and a paired second half-life extension domain (“second domain”) that each contain an Fc domain: (a) Y4071 in the second domain and T366Y in the first domain, (b) Y407A in the second domain and T366W in the first domain; (c) F405A in the second domain and T394W in the first domain; (d) F405W in the second domain and 13945 in the first domain: (e) Y407T in the second domain and T366Y in the first domain; (f) T366Y and F405A in the second domain and T394W and Y407T in the first domain; (g) T366W and F405W in the second domain and T394S and Y407A in the first domain; (h) F405W and Y407A in the second domain and T366W and T394S in the first domain; or (i) T366W in the second domain and T366S, L368A, and Y407V in the first domain, numbered according to the Kabat EU numbering system.

[0365] In embodiments comprising a first half-life extension domain and a second half-life extension domain that each comprise an Fc domain, any of the heterodimerizing alterations described herein can be used in the Fc domains to promote heterodimerization of any of the masked cytokines described herein.

[0366] 1.5 Exemplary Masked Cytokines

[0367] Masked cytokines according to the disclosure can combine a IL-12 cytokine or functional fragment thereof as described anywhere herein; a masking moiety as described anywhere herein; first and second half life domains as described anywhere herein; and cleavable and non-cleavable linkers as described anywhere herein.

[0368] Furthermore, in an embodiment, any specific sequence disclosed herein may optionally comprise further amino acid substitutions, such as one, two or three substitutions. In another embodiment, sequences having at least 90% homology, preferably 95%, more preferably 99%, to any specific sequence disclosed herein for a domain of the masked cytokines are also encompassed by the invention.

[0369] In some embodiments, the IL-12 cytokine or functional fragment thereof comprises the amino acid sequence of SEQ ID NO: 4, the masking moiety comprises human IL-12Rβ1 or a fragment, portion, or variant thereof that retains or otherwise demonstrates an affinity to IL-12, and the first half-life extension domain comprises SEQ ID NO: 25 (Y349C; T366S; L38A; Y407V; and N297A) and the second half-life extension domain comprises SEQ ID NO 26 (S354C, T366W and N297A).

[0370] In some embodiments, the IL-12 cytokine or functional fragment thereof comprises the amino acid sequence of SEQ ID NO: 4, the masking moiety comprises residues 24 to 237 of human IL-12Rβ1, namely a sequence having SEQ ID NO: 5 or a fragment, portion, or variant thereof that retains or otherwise demonstrates an affinity to IL-12, and the first half-life extension domain comprises SEQ. ID NO: 25 (Y349C; T366S; L38A; Y407V; and N297A) and the second half-life extension domain comprises SEQ ID NO 26 (S354C, T366W and N297A).

[0371] In some embodiments, the IL-12 cytokine or functional fragment thereof comprises the amino acid sequence of SEQ ID NO: 4, the masking moiety comprises residues 24 to 545 of human IL-12Rβ1, namely a sequence having SEQ ID NO: 6 or a fragment, portion, or variant thereof that retains or otherwise demonstrates an affinity to IL-12, and the first half-life extension domain comprises SEQ ID NO: 25 (Y349C; T366S; L38A; Y407V; and N297A) and the second half-life extension domain comprises SEQ ID NO 26 (S354C, T366W and N297A).

[0372] In some embodiments, the IL-12 cytokine or functional fragment thereof comprises the amino acid sequence of SEQ ID NO: 4, the masking moiety comprises human IL-12Rβ2 or a fragment, portion, or variant thereof that retains or otherwise demonstrates an affinity to IL-12, and the first half-life extension domain comprises SEQ ID NO: 25 (Y349C; T366S; L38A, Y407V; and N297A) and the second half-life extension domain. comprises SEQ ID NO 26 (S354C, T366W and N297A).

[0373] In some embodiments, the IL-12 cytokine or functional fragment thereof comprises the amino acid sequence of SEQ ID NO: 61, the masking moiety comprises human IL-12Rβ2 or a fragment, portion, or variant thereof that retains or otherwise demonstrates an affinity to IL-12, and the first half-life extension domain comprises SEQ ID NO: 25 (Y349C; T366S; L38A; Y407V; and N297A) and the second half-life extension domain comprises SEQ ID NO 26 (S354C, T366W and N297A).

[0374] In some embodiments, the IL-12 cytokine or functional fragment thereof comprises the amino acid sequence of SEQ ID NO: 62, the masking moiety comprises human IL-12Rβ2 or a fragment, portion, or variant thereof that retains or otherwise demonstrates an affinity to IL-12, and the first half-life extension domain comprises SEQ ID NO: 25 (Y349C; T366S; 1.38A; Y407V; and N297A) and the second half-life extension domain. comprises SEQ ID NO 26 (5354C, T366W and N297A).

[0375] In some embodiments, the IL-12 cytokine or functional fragment thereof comprises the amino acid sequence of SEQ ID NO: 63, the masking moiety comprises human IL-12Rβ2 or a fragment, portion, or variant thereof that retains or otherwise demonstrates an affinity to IL-12, and the first half-life extension domain comprises SEQ ID NO: 25 (Y349C, T366S; L38A Y401V: and N297A) and the second half-life extension domain comprises SEQ ID NO 26 (S354C, T366W and N297A).

[0376] In some embodiments, the IL-12 cytokine or functional fragment thereof comprises the amino acid sequence of SEQ ID NO: 64, and the first half-life extension domain comprises SEQ ID NO: 25 (Y349C; T366S; L38A; Y407V; and N297A) and the second half-life extension domain comprises SEQ ID NO 26 (S354C, T366W and N297A).

[0377] In some embodiments, the IL-12 cytokine or functional fragment thereof comprises the amino acid. sequence of SEQ ID NO: 64, the masking moiety comprises human IL-12Rβ2 or a fragment, portion, or variant thereof that retains or otherwise demonstrates an affinity to IL-12, and the first half-life extension domain comprises SEQ ID NO: 25 (Y349C; T366S; L38A; Y407V; and N297A) and the second half-life extension domain comprises SEQ ID NO 26 (S354C, T366W and N297A).

[0378] In some embodiments, the IL-12 cytokine or functional fragment thereof comprises the amino acid sequence of SEQ ID NO: 4, the masking moiety comprises residues 24 to 212 of human IL-12Rβ2, namely a sequence having SEQ ID NO: 7, and the first half-life extension domain comprises SEQ ID NO: 25 (Y349C; T366S; L38A; Y407V; and N297A) and the second half-life extension domain comprises SEQ ID NO 26 (S354C, T366W and N297A).

[0379] In some embodiments, the IL-12 cytokine or functional fragment thereof comprises the amino acid sequence of SEQ ID NO: 4, the masking moiety comprises residues 24 to 222 of human IL-12Rβ2, namely a sequence having SEQ ID NO: 8, and the first half-life extension domain comprises SEQ ID NO: 25 (Y349C, T366S; L38A; Y407V; and N297A) and the second half-life extension domain comprises SEQ ID NO 26 (S354C, T366W and N297A).

[0380] In some embodiments, the IL-12 cytokine or functional fragment thereof comprises the amino acid sequence of SEQ ID NO: 4, the masking moiety comprises residues 24 to 319 of human IL-12RP2, namely a sequence having SEQ ID NO: 9, and the first half-life extension domain comprises SEQ ID NO: 25 (Y349C; T366S; L38A; Y407V; and N297A) and the second half-life extension domain comprises SEQ ID NO 26 (S354C, T366W and N297A).

[0381] In some embodiments, the IL-12 cytokine or functional fragment thereof comprises the amino acid sequence of SEQ ID NO: 4, the masking moiety comprises residues 24 to 319 of human IL-12Rβ2, namely a sequence having SEQ ID NO: 65, and the first half-life extension domain comprises SEQ ID NO: 25 (Y349C; T366S; L38A; Y407V; and N297A) and the second extension domain comprises SEQ ID NO 26 (S354C, T366W and N297A).

[0382] In some embodiments, the IL-12 cytokine or functional fragment thereof comprises the amino acid sequence of SEQ ID NO: 63, the masking moiety comprises residues 24 to 319 of human IL-12Rβ2, namely a sequence having SEQ ID NO: 65, and the first half-life extension domain comprises SEQ ID NO: 25 (Y349C; T366S; L38A; Y407V; and N297A) and the second half-life extension domain comprises SEQ ID NO 26 (S354C, T366W and N297A).

[0383] In some embodiments, the IL-I2 cytokine or functional fragment thereof comprises the amino acid sequence of SEQ ID NO: 64, the masking moiety comprises residues 24 to 319 of human IL-12Rβ2, namely a sequence having SEQ ID NO: 65, and the first half-life extension domain comprises SEQ ID NO: 25 (Y349C; T366S; L38A; Y407V; and N297A) and the second half-life extension domain comprises SEQ ID NO 26 (S354C, T366W and N297A).

[0384] In some embodiments, the masking moiety comprises residues 24 to 319 of human IL-12Rβ2, namely a sequence having SEQ ID NO: 65, and the first half-life extension domain comprises SEQ ID NO: 25 (Y349C; T366S; L38A; Y407V; and N297A) and the second half-life extension domain comprises SEQ ID NO 26 (S354C, T366W and N297A).

[0385] In some embodiments, the IL-12 cytokine or functional fragment thereof comprises the amino acid sequence of SEQ ID NO: 4, the masking moiety comprises residues 24 to 622 of human IL-12Rβ2, namely a sequence having SEQ ID NO: 10, and the first half-life extension domain comprises SEQ ID NO: 25 (Y349C; T366S; L38A; Y407V; and N297A) and the second half-life extension domain comprises SEQ ID NO 26 (S354C, T366W and N297A).

[0386] In some embodiments, the IL-12 cytokine or functional fragment thereof comprises the amino acid sequence of SEQ ID NO: 4, the masking moiety comprises residues 24 to 227 of human IL-12Rβ2, namely a sequence having SEQ ID NO: 11, and the first half-life extension domain comprises SEQ ID NO: 25 (Y349C; T366S; L38A; Y407V; and N297A) and the second half-life extension domain comprises SEQ ID NO 26 (S354C, T366W arid N297A).

[0387] In some embodiments, the IL-12 cytokine or functional fragment thereof comprises the amino acid sequence of SEQ ID NO: 4, the masking moiety comprises human IL-12Rβ1 or a fragment, portion, or variant thereof that retains or otherwise demonstrates an affinity to IL-12 and the first half-life extension domain comprises SEQ ID NO: 27 (Y349C; T366S; T38A; Y407V, N297A and I253A) and the second half life extension domain comprises SEQ ID NO: 28 (S354C, T366W, N297A and I253A).

[0388] In some embodiments, the IL-12 cytokine or functional fragment thereof comprises the amino acid sequence of SEQ ID NO: 4, the masking moiety comprises residues 24 to 237 of human IL-12Rβ1, namely a sequence having SEQ ID NO: 5 or a fragment, portion, or variant thereof that retains or otherwise demonstrates an affinity to IL-12 and the first half-life extension domain comprises SEQ ID NO: 27 (Y349C; T366S; L38A; Y407V, N297A and I253A) and the second half-life extension domain comprises SEQ ID NO: 28 (S354C, T366W, N297A and I253A).

[0389] In some embodiments, the IL-12 cytokine or functional fragment thereof comprises the amino acid sequence of SEQ ID NO: 4, the masking moiety comprises residues 24 to 545 of human IL-12Rβ1, namely a sequence having SEQ ID NO: 6 or a fragment, portion, or variant thereof that retains or otherwise demonstrates an affinity to IL-12 and the first half-life extension domain comprises SEQ ID NO: 27 (Y349C; T366S; L38A, Y407V, N297A and I253A) and the second half-life extension domain comprises SEQ ID NO: 28 (S354C, T366W, N297A and I253A).

[0390] In some embodiments, the IL-12 cytokine or functional fragment thereof comprises the amino acid sequence of SEQ ID NO: 4, the masking moiety comprises human IL-12Rβ2 or a fragment, portion, or variant thereof that retains or otherwise demonstrates an affinity to IL-12 and the first half-life extension domain comprises SEQ ID NO: 27 (Y349C, T366S, L38A; Y407V, N297A and I253A) and the second half-life extension domain comprises SEQ ID NO: 28 (S354C, T366W, N297A and I253A).

[0391] In some embodiments, the IL-12 cytokine or functional fragment thereof comprises the amino acid sequence of SEQ ID NO: 4, the masking moiety comprises residues 24 to 212 of human IL-12Rβ2, namely a sequence having SEQ ID NO: 7 and the first half-life extension domain comprises SEQ ID NO: 27 (Y349C; T366S; L38A; Y407V, N297A and I253A) and the second half-life extension domain comprises SEQ ID NO: 28 (S354C, T366W, N297A and I253A).

[0392] In some embodiments, the IL-12 cytokine or functional fragment thereof comprises the amino acid sequence of SEQ ID NO: 4, the masking moiety comprises residues 24 to 222 of human IL-12Rβ2, namely a sequence having SEQ ID NO: 8 and the first half-life extension domain comprises SEQ ID NO: 27 (Y349C; T366S; L38A; Y407V, N297A and I253A) and the second half-life extension domain comprises SEQ ID NO: 28 (S354C, T366W, N297A and I253A).

[0393] In some embodiments, the IL-12 cytokine or functional fragment thereof comprises the amino acid sequence of SEQ ID NO: 4, the masking moiety comprises residues 24 to 319 of human IL-12Rβ2, namely a sequence having SEQ ID NO: 9 and the first half-life extension domain comprises SEQ ID NO: 27 (Y349C; T366S; L38A; Y407V, N297A and I253A) and the second half-life extension domain comprises SEQ ID NO: 28 (S354C, T366W, N297A and I253A).

[0394] In some embodiments, the IL-12 cytokine or functional fragment thereof comprises the amino acid sequence of SEQ ID NO: 4, the masking moiety comprises residues 24 to 622 of human IL-12Rβ2, namely a sequence having SEQ ID NO: 10 and the first half-life extension domain comprises SEQ ID NO: 27 (Y349C; T366S; L38A; Y407V, N297A and I253A) and the second half-life extension domain comprises SEQ ID NO: 28 (S354C, T366W, N297A and I253A).

[0395] In some embodiments, the IL-I2 cytokine or functional fragment thereof comprises the amino acid sequence of SEQ ID NO: 4, the masking moiety comprises residues 24 to 227 of human IL-121132, namely a sequence having SEQ ID NO: 11 and the first half-life extension domain comprises SEQ ID NO: 27 (Y349C; T366S; L38A; Y407V, N297A and I253A) and the second half-life extension domain comprises SEQ ID NO: 28 (S354C, T366W, N297A and I253A),

[0396] In some embodiments, the IL-12 cytokine or functional fragment thereof comprises the ammo acid sequence of SEQ ID NO: 64 and the masking moiety comprises residues 24 to 319 of human IL-12Rβ2, namely a sequence having. SEQ ID NO: 65.

[0397] In some embodiments, the IL-12 cytokine or functional fragment thereof comprises the amino acid sequence of SEQ ID NO: 64, the masking moiety comprises residues 24 to 319 of human IL-12Rβ2, namely a sequence having SEQ ID NO: 65, the non-cleavable linker comprises the amino acid sequence of SEQ ID NO: 14, and the first half-life extension domain comprises SEQ ID NO: 25 (Y349C; T366S; L38A; Y407 V; and N297A) and the second half-life extension domain comprises SEQ ID NO 26 (S354C, T366W and N297A).

[0398] In some embodiments, the IL-12 cytokine or functional fragment thereof comprises the amino acid sequence of SEQ ID NO: 64, the masking moiety comprises residues 24 to 319 of human IL-12Rβ2, namely a sequence having SEQ ID NO: 65, the non-cleavable linker comprises the amino acid sequence of SEQ ID NO: 55, and the first half-life extension domain comprises SEQ ID NO: 25 (Y349C; T366S; L38A; Y407V; and N297A) and the second half-life extension domain comprises SEQ ID NO 26 (S354C, T366W and N297A).

[0399] In some embodiments, the IL-12 cytokine or functional fragment thereof comprises the amino acid sequence of SEQ ID NO: 64, the masking moiety comprises residues 24 to 319 of human IL-12^{-Rβ}2, namely a sequence having SEQ ID NO: 65, the non-cleavable linker comprises the amino acid sequence of SEQ ID NO: 56, and the first half-life extension domain comprises SEQ ID NO: 25 (Y349C; T366S; L38A; Y407V; and N297A) and the second half-life extension domain comprises SEQ ID NO 26 (S354C, T366W and N297A).

[0400] In some embodiments, the IL-12 cytokine or functional fragment thereof comprises the amino acid sequence of SEQ ID NO: 64, the masking moiety comprises residues 24 to 319 of human IL-12Rβ2, namely a sequence having SEQ ID NO: 65, the cleavable peptide comprises the amino acid sequence of SEQ ID NO: 41, and the first half-life extension domain comprises SEQ ID NO: 25 (Y349C; T366S; L38A; Y407V; and N297A) and the second half-life extension domain comprises SEQ ID NO 26 (S354C, T366W and N297A).

[0401] In some embodiments, the IL-12 cytokine or functional fragment thereof comprises the amino acid sequence of SEQ ID NO: 64, the masking moiety comprises residues 24 to 319 of human IL-12Rβ2, namely a sequence haying SEQ ID NO: 65, the cleavable peptide comprises the amino acid sequence of SEQ ID NO: 43, and the first half-life extension domain comprises SEQ ID NO: 25 (Y349C; T366S; L38A; Y407V; and N297A) and the second half-life extension domain comprises SEQ ID NO 26 (S354C, T366W and N297A).

[0402] In some embodiments, the IL-12 cytokine or functional fragment thereof comprises the amino acid sequence of SEQ ID NO: 64, the masking moiety comprises residues 24 to 319 of human IL-12Rβ2, namely a sequence having SEQ ID NO: 65, the cleavable peptide comprises the amino acid sequence of SEQ ID NO: 44, and the first half-life extension domain comprises SEQ ID NO: 25 (Y349C; T366S; L38A; Y407V; and N297A) and the second half-life extension domain comprises SEQ ID NO 26 (S354C, T366W and N297A).

[0403] In some embodiments, the IL-12 cytokine or functional fragment thereof comprises the amino acid sequence of SEQ ID NO: 64, the masking moiety comprises residues 24 to 319 of human IL-12Rβ2, namely a sequence having SEQ ID NO: 65, the cleavable linker comprises the amino acid sequence of SEQ ID NO: 51, and the first half-life extension domain comprises SEQ ID NO: 25 (Y349C; T366S; L38A; Y407V; and N297A) and the second half-life extension domain comprises SEQ ID NO 26 (S354C, T366W and N297A).

[0404] In some embodiments, the IL-12 cytokine or functional fragment thereof comprises the amino acid sequence of SEQ ID NO: 64, the masking moiety comprises residues 24 to 319 of human IL-12Rβ2, namely a sequence having SEQ ID NO: 65, the cleavable linker comprises the amino acid sequence of SEQ ID NO: 53, and the first half-life extension domain comprises SEQ ID NO: 25 (Y349C; T366S; L38A; Y407V; and N297A) and the second half-life extension domain comprises SEQ ID NO 26 (S354C, T366W and N297A).

[0405] In some embodiments, the IL-12 cytokine or functional fragment thereof comprises the amino acid sequence of SEQ ID NO: 64, the masking moiety comprises residues 24 to 319 of human IL-12Rβ2, namely a sequence having SEQ ID NO: 65, the cleavable linker comprises the amino acid sequence of SEQ ID NO: 46, and the first half-life extension domain comprises SEQ ID NO: 25 (Y349C; T366S; L38A; Y407V; and N297A) and the second half-life extension domain comprises SEQ ID NO 26 (S354C, T366W and N297A).

[0406] In some embodiments, the IL-12 cytokine or functional fragment thereof comprises the amino acid sequence of SEQ ID NO: 64, the masking moiety comprises residues 24 to 319 of human IL-12Rβ2, namely a sequence having SEQ ID NO: 65, the non-cleavable linker comprises the amino acid sequence of SEQ ID NO: 56, the cleavable linker comprises the amino acid sequence of SEQ ID NO: 51, and the first half-life extension domain comprises SEQ ID NO: 25 (Y349C; T366S; L38A; Y407V; and N297A) and the second half-life extension domain comprises SEQ ID NO 26 (S354C, T366W and N297A).

[0407] In some embodiments, the IL-12 cytokine or functional fragment thereof comprises the amino acid sequence of SEQ ID NO: 64, the masking moiety comprises residues 24 to 319 of human IL-12Rβ2, namely a sequence having SEQ ID NO: 65, the non-cleavable linker comprises the amino acid sequence of SEQ ID NO: 14, the cleavable linker comprises the amino acid sequence of SEQ ID NO: 53, and the first half-life extension domain comprises SEQ ID NO: 25 (Y349C; T366S, L38A; Y407 and N297A) and the second half-life extension domain comprises SEQ ID NO 26 (S354C, T366W and N297A).

[0408] In some embodiments, the IL-12 cytokine or functional fragment thereof comprises the amino acid sequence of SEQ ID NO: 64, the masking moiety comprises residues 24 to 319 of human IL-12Rβ2, namely a sequence having SEQ ID NO: 65, the non-cleavable linker comprises the amino acid sequence of SEQ ID NO: 55, the cleavable linker comprises the amino acid sequence of SEQ ID NO: 46, and the first half-life extension domain comprises SEQ ID NO: 25 (Y349C; T366S; L38A; Y407V; and N297A) and the second half-life extension domain comprises SEQ ID NO 26 (S354C, T366W and N297A).

[0409] In some embodiments of the masked cytokine, the first polypeptide chain comprises:

N′ HL1-L1-MM C′

[0410] and the second polypeptide chain comprises:

N′ HL2-L2-[IL-12p35-linker-IL-12p40] C′

[0411] where ‘IL-12p40’ is the IL-12p40 polypeptide or functional fragment thereof and ‘IL-12p35’ is the IL-12p35 polypeptide or functional fragment thereof. The first half life extension domain (HL1), the first linker (L1), the masking moiety (MM), the second half life extension domain (HL2), the second linker (L2) and IL-12 cytokine or fragment thereof ([IL-12p35-linker-IL-12p40]) may he as defined anywhere herein.

[0412] In some embodiments, the masked cytokine comprises a first polypeptide chain comprising an amino acid sequence of SEQ ID NO:34 and a second polypeptide chain comprising an amino acid sequence of SEQ ID NO: 40.

[0413] In some embodiments, the masked cytokine comprises a first polypeptide chain comprising an amino acid sequence of SEQ ID NO: 81 and a second polypeptide chain comprising an amino acid sequence of SEQ ID NO: 40.

[0414] In some embodiments, the masked cytokine comprises a first polypeptide chain comprising an amino acid sequence of SEQ ID NO: 34 and a second polypeptide chain comprising an amino acid sequence of SEQ ID NO: 88.

[0415] In some embodiments, the masked cytokine comprises a first polypeptide chain comprising an amino acid sequence of SEQ ID NO: 81 and a second polypeptide chain comprising an amino acid sequence of SEQ ID NO: 88.

[0416] In some embodiments, the masked cytokine comprises a first polypeptide chain comprising an amino acid sequence of SEQ ID NO: 82 and a second polypeptide chain comprising an amino acid sequence of SEQ ID NO: 89.

[0417] In some embodiments, the masked cytokine comprises a first polypeptide chain comprising an amino acid sequence of SEQ ID NO: 83 and a second polypeptide chain comprising an amino acid sequence of SEQ ID NO: 90.

[0418] In some embodiments, the masked cytokine comprises a first polypeptide chain comprising art amino acid sequence of SEQ ID NO: 83 and a second polypeptide chain comprising an amino acid sequence of SEQ ID NO: 91.

[0419] In some embodiments, the masked cytokine comprises a first polypeptide chain comprising an amino acid sequence of SEQ ID NO: 82 and a second polypeptide chain comprising an amino acid sequence of SEQ ID NO: 92.

[0420] In some embodiments, the masked cytokine comprises a first polypeptide chain comprising an amino acid sequence of SEQ ID NO: 83 and a second polypeptide chain comprising an amino acid sequence of SEQ ID NO: 93.

[0421] In some embodiments, the masked cytokine comprises a first polypeptide chain comprising an amino acid sequence of SEQ ID NO: 82 and a second polypeptide chain comprising an amino acid sequence of SEQ ID NO: 94.

[0422] In some embodiments, the masked cytokine comprises a first polypeptide chain comprising an amino acid sequence of SEQ ID NO: 84 and a second polypeptide chain comprising an amino acid sequence of SEQ ID NO: 93.

[0423] In some embodiments, the masked cytokine comprises a first polypeptide chain comprising an amino acid sequence of SEQ ID NO: 84 and a second polypeptide chain comprising an amino acid sequence of SEQ ID NO: 94.

[0424] In some embodiments, the masked cytokine comprises a first polypeptide chain comprising an amino acid sequence of SEQ ID NO: 83 and a second polypeptide chain comprising an amino acid sequence of SEQ ID NO: 95.

[0425] In some embodiments, the masked cytokine comprises a first polypeptide chain comprising an amino acid sequence of SEQ ID NO: 82 and a second polypeptide chain comprising an amino acid sequence of SEQ ID NO: 96.

[0426] In some embodiments, the masked cytokine comprises a first polypeptide chain comprising an amino acid sequence of SEQ ID NO: 83 and a second polypeptide chain comprising an amino acid sequence of SEQ ID NO: 97.

[0427] In some embodiments, the masked cytokine comprises a first polypeptide chain comprising art amino acid sequence of SEQ ID NO: 82 and a second polypeptide chain comprising an amino acid sequence of SEQ ID NO: 98.

[0428] In some embodiments, the masked cytokine comprises a first polypeptide chain comprising an amino acid sequence of SEQ ID NO: 84 and a second polypeptide chain comprising an amino acid sequence of SEQ ID NO: 97.

[0429] In some embodiments, the masked cytokine comprises a first polypeptide chain comprising an amino acid sequence of SEQ ID NO: 84 and a second polypeptide chain comprising an amino acid sequence of SEQ ID NO: 98.

### 2. CLEAVAGE PRODUCT

[0430] Provided herein is a cleavage product of a ‘heterodimeric’ masked IL-12 cytokines described herein.

[0431] The masked IL-12 cytokines described herein comprise a cleavable linker. Upon proteolytic cleavage of the cleavable linker at the cleavage site, a cleavage product comprising the IL-12 cytokine or functional fragment thereof is formed. The IL-12 cytokine or functional fragment thereof in the cleavage product is activated since it is no longer masked by the masking moiety. The IL-12 cytokine or functional fragment thereof in the cleavage product is therefore capable of binding to the target protein.

[0432] The tumor cell environment is complex and can comprise multiple different proteases. As such, the precise site at which a given cleavable peptide within a masked IL-12 cytokine will be cleaved in the tumor cell environment may vary between tumor types, between patients with the same tumor type and even between cleavage products formed in the same tumor. Moreover, even after cleavage, further modification of the initial cleavage product, e.g, by removal of one or two terminal amino acids, may occur by the further action of proteases in the tumor cell environment. A distribution of cleavage products can thus be expected to form in the tumor cell. environment of a patient following administration of a masked cytokine as described he rent.

[0433] Provided herein is a cleavage product capable of binding to IL-12R, the cleavage product comprising art IL-12 cytokine or functional fragment thereof, preparable by proteolytic cleavage of the cleavable peptide in a masked IL-12 cytokine as described anywhere herein.

[0434] Also provided herein is a cleavage product of a masked IL-12 cytokine, where the cleavage product is capable of binding to IL-12R, the cleavage product comprising an IL-2 cytokine or functional fragment thereof as defined anywhere herein. Also provided herein is a distribution of cleavage products obtained or obtainable from a single structure of a masked IL-12 cytokine, where each cleavage product within the distribution of cleavage products (i) is capable of binding to IL-12R and (ii) comprises an IL-12 cytokine or functional fragment thereof as defined anywhere herein.

[0435] Also provided herein is a cleavage product of a masked IL-12 cytokine, where the cleavage product is capable of binding to IL-12R, the cleavage product comprising a polypeptide comprising:

PCP-SD-C

[0436] wherein PCP is a portion of a proteolytically cleavable peptide; SD is a spacer domain; and C is an IL-12 cytokine or functional fragment thereof.

[0437] Further provided herein is a cleavage product of a masked IL-12 cytokine, where the cleavage product is capable of binding to IL-12R, the cleavage product comprising a protein heterodimer comprising:
[0438] a) a first poly peptide chain comprising a first half-life extension domain; and
[0439] b) a second polypeptide chain comprising a polypeptide comprising formula 5:

HL2-L2-C (5)

[0440] wherein HL2 is a second half-life extension domain; L2 is a non-cleavable linker; and C is an IL-12 cytokine or functional fragment thereof; and wherein the first half-life extension domain is associated with the second half-life extension domain. Also provided herein is a distribution of cleavage products Obtained or Obtainable from a single structure of a masked IL-12 cytokine, where each cleavage product within the distribution of cleavage products (i) is capable of binding to IL-12R and (ii) comprises a protein heterodimer comprising:
[0441] a) a first polypeptide chain comprising a first half-life extension domain; and
[0442] b) a second polypeptide chain comprising a polypeptide comprising formula 5:

HL2-L2-C (5)

[0443] wherein HL2 is a second half-life extension domain; L2 is a non-cleavable linker; and C is an IL-12 cytokine or functional fragment thereof; and wherein the first half-life extension domain is associated with the second half-life extension domain.

[0444] Further provided herein is a cleavage product of a masked IL-12 cytokine, where the cleavage product is capable of binding to IL-12R, the cleavage product comprising a protein heterodimer comprising:
[0445] a) a first poly peptide chain comprising a polypeptide comprising:

[0446] wherein HL1 is a first half-life extension domain; SD is a spacer domain; and PCP is a portion of a proteolytically cleavable peptide; and
[0447] b) a second polypeptide chain comprising a polypeptide comprising:

HL2-L2-C

[0448] wherein HL2 is a second half-life extension domain; L2 is a non-cleavable linker; and C is an IL-12 cytokine or functional fragment thereof; and

[0449] wherein the first half-life extension domain is associated with the second half-life extension domain.

[0450] Within the cleavage product, the masking moiety, half-life extension domains, IL-12 cytokine or functional fragment thereof, linkers, space domains and type of association between the first half-life extension domain and the second half-life extension domain may be any one of those described herein, and any combination of those described herein.

[0451] The location of the cleavable peptide determines the structure of the resulting cleavage product comprising the IL-12 cytokine.

[0452] A “portion of a proteolytically cleavable peptide”, refers to a part of the original proteolytically cleavable peptide sequence after cleavage at the cleavage site has occurred. After cleavage, further modification of the initial cleavage product, e.g. by removal of one or two terminal amino acids, may also occur by the further action of proteases in the tumor cell environment. As such, cleavage products within the distribution of cleavage products that might be formed in the tumor cell environment of a patient following administration of a masked cytokine might not contain any portion of the proteolytically cleavable peptide.

[0453] In some embodiments, a “portion” refers to 1 amino acid, 2 amino acids, 3 amino acids. 4 amino acids, 5 amino acids or 6 amino acids of the original proteolytically cleavable peptide sequence. In some embodiments, a “portion” refers to 2 amino acids of the original proteolytically cleavable peptide sequence. In some embodiments, a “portion” refers to 3 amino acids of the original proteolytically cleavable peptide sequence. In some embodiments, a “portion” refers to 4 amino acids of the original proteolytically cleavable peptide sequence.

[0454] In some embodiments, the ‘portion’ of the proteolytically cleavable peptide is from 3 to 6 amino acids in length. In some embodiments, the ‘portion’ of the proteolytically cleavable peptide is 3 or 4 amino acids in length.

[0455] Cleavage sites for cleavable linkers disclosed herein are disclosed below:

Sequence
(* indicates a cleavage site
within the cleavable peptide)
MPYD*LYHP
DSGG*FMLT
HEQ*LTV
RAAA*VKSP
VPLS*LY
ISSGLL*SGRS
DLLA*VVAAS

[0456] Purely by way of example, in the above table, * indicates a known or observed protease cleavage site within the cleavable peptide.

[0457] Accordingly, herein disclosed is the cleavage product of any one of (ed cytokines disclosed herein.

[0458] In some embodiments, the cleavage product comprises an amino acid sequence having about or at least about 85%, 86%, 87%, 88%, 89%, 90%, 91%, 92%, 93%, 94%, 95%, 96%, 97%, 98%, or 99% sequence identity to an amino acid sequence selected from the group consisting of SEQ ID NO: 29.

[0459] In some embodiments, the cleavage product comprises an amino acid sequence having an amino acid sequence comprising SEQ ID NO: 29.

[0460] In some embodiments, the cleavage product comprises an amino acid sequence having about or at least about 85%, 86%, 87%, 88%, 89%, 90%, 91%, 92%, 93%, 94%, 95%, 96%, 97%, 98%, or 99% sequence identity to an amino acid sequence selected from the group consisting of SEQ ID NO: 66.

[0461] In some embodiments, the cleavage product comprises an amino acid sequence having an amino acid sequence comprising SEQ ID NO: 66.

[0462] In some embodiments, the cleavage product comprises an amino acid sequence having about or at least about 85%, 86%, 87%, 88%, 89%, 90%, 91%, 92%, 93%, 94%, 95%, 96%, 97%, 98%, or 99% sequence identity to an amino acid sequence selected from the group consisting of SEQ ID NO: 67.

[0463] In some embodiments, the cleavage product comprises an amino acid sequence having an amino acid sequence comprising SEQ ID NO: 67.

[0464] In some embodiments, the cleavage product comprises an amino acid sequence having about or at least about 85%, 86%, 87%, 88%, 89%, 90%, 91%, 92%, 93%, 94%, 95%, 96%, 97%, 98%, or 99% sequence identity to an amino acid sequence selected from the group consisting of SEQ ID NO: 68.

[0465] In some embodiments, the cleavage product comprises an amino acid sequence having an amino acid sequence comprising SEQ ID NO: 68.

[0466] In some embodiments, the cleavage product comprises an amino acid sequence having about or at least about 85%, 86%, 87%, 88%, 89%, 90%, 91%, 92%, 93%, 94%, 95%, 96%, 97%, 98%, or 99% sequence identity to an amino acid sequence selected from the group consisting of SEQ ID NO: 69.

[0467] In some embodiments, the cleavage product comprises an amino acid sequence having an amino acid sequence comprising SEQ ID NO: 69.

[0468] In some embodiments, the cleavage product comprises an amino acid sequence having about or at least about 85%, 86%, 87%, 88%, 89%, 90%, 91%, 92%, 93%, 94%, 95%, 96%, 97%, 98%, or 99% sequence identity to an amino acid sequence selected from the group consisting of SEQ ID NO: 70.

[0469] In some embodiments, the cleavage product comprises an amino acid sequence having an amino acid sequence comprising SEQ ID NO: 70.

[0470] In some embodiments, the cleavage product comprises an amino acid sequence having about or at least about 85%, 86%, 87%, 88%, 89%, 90%, 91%, 92%, 93%, 94%, 95%, 96%, 97%, 98%, or 99% sequence identity to an amino acid sequence selected from the group consisting of SEQ ID NO: 71.

[0471] In some embodiments, the cleavage product comprises an amino acid sequence having an amino acid sequence comprising SEQ ID NO: 71.

[0472] In some embodiments, the cleavage product comprises an amino acid sequence having about or at least about 85%, 86%, 87%, 88%, 89%, 90%, 91%, 92%, 93%, 94%, 95%, 96%, 97%, 98%, or 99% sequence identity to an amino acid sequence selected from the group consisting of SEQ ID NO: 72.

[0473] In some embodiments, the cleavage product comprises an amino acid sequence having an amino acid sequence comprising SEQ ID NO: 72.

[0474] In some embodiments, the cleavage product comprises an amino acid sequence having about or at least about 85%, 86%, 87%, 88%, 89%, 90%, 91%, 92%, 93%, 94©, 95%, 96%, 97%, 98%, or 99% sequence identity to an amino acid sequence selected front the group consisting of SEQ ID NO: 73.

[0475] In some embodiments, the cleavage product comprises an amino acid sequence having an amino acid sequence comprising SEQ ID NO: 73.

[0476] In some embodiments, the cleavage product comprises an amino acid sequence having about or at least about 85%, 86%, 87%, 88%, 89%, 90%, 91%, 92%, 93%, 94%, 95%, 96%, 97%, 98%, or 99% sequence identity to an amino acid sequence selected from the group consisting of SEQ ID NO: 74.

[0477] In some embodiments, the cleavage product comprises an amino acid sequence having an amino acid sequence comprising SEQ ID NO: 74.

[0478] In some embodiments, the cleavage product comprises an amino acid sequence having about or at least about 85%, 86%, 87%, 88%, 89%, 90%, 91%, 92%, 93%, 94%, 95%, 96%, 97%, 98%, or 99% sequence identity to an amino acid sequence selected from the group consisting of SEQ ID NO: 75.

[0479] In some embodiments, the cleavage product comprises an amino acid sequence having an amino acid sequence comprising SEQ ID NO: 75.

[0480] In some embodiments, the cleavage product comprises an amino acid sequence having about or at least about 85%, 86%, 87%, 88%, 89%, 90%, 91%, 92%, 93%, 94%, 95%, 96%, 97%, 98%, or 99% sequence identity to an amino acid sequence selected from the group consisting of SEQ ID NO: 76.

[0481] In some embodiments, the cleavage product comprises an amino acid sequence having an amino acid sequence comprising SEQ ID NO: 76.

[0482] In some embodiments, the cleavage product comprises an amino acid sequence having about or at least about 85%, 86%, 87%, 88%, 89%, 90%, 91%, 92%, 93%, 94%, 95%, 96%, 97%, 98%, or 99% sequence identity to an amino acid sequence selected from the group consisting of SEQ ID NO: 77.

[0483] In some embodiments, the cleavage product comprises an amino acid sequence having an amino acid sequence comprising SEQ ID NO: 77.

[0484] In some embodiments, the cleavage product comprises an amino acid sequence having about or at least about 85%, 80%, 87%, 88%, 89%, 90%, 91%, 92%, 93%, 94%, 95%, 96%, 97%, 98%, or 99% sequence identity to an amino acid sequence selected from the group consisting of SEQ ID NO: 78.

[0485] In some embodiments, the cleavage product comprises an amino acid sequence having an amino acid sequence comprising SEQ ID NO: 78.

[0486] In some embodiments, the cleavage product comprises an amino acid sequence having about or at least about 85%, 86%, 87%, 88%, 89%, 90%, 91%, 92%, 93%, 94%, 95%, 96%, 97%, 98%, or 99% sequence identity to an amino acid sequence selected from the group consisting of SEQ ID NO: 79.

[0487] In some embodiments, the cleavage product comprises an amino acid sequence having an amino acid sequence comprising SEQ ID NO: 79.

[0488] In soiree embodiments, the cleavage product comprises an amino acid sequence having about or at least about 85%, 86%, 87%, 88%, 89%, 90%, 91%, 92%, 93%, 94%, 95%, 96%, 97%, 98%, or 99% sequence identity to an amino acid sequence selected from the group consisting of SEQ ID NO: 80.

[0489] In some embodiments, the cleavage product comprises an amino acid sequence having an amino acid sequence comprising SEQ ID NO: 80.

[0490] 3. Binding Assays

[0491] The strength, or affinity of immunological binding interactions, such as between a cytokine or functional fragment thereof and a binding partner (e.g., a target protein, such as a cytokine receptor) for which the cytokine or functional fragment thereof is specific, can be expressed in terms of the dissociation constant (Kd) of the interaction, wherein a smaller Kd represents a greater affinity. The binding of the IL-12 cytokine to the IL-12 cytokine receptor can be expressed in terms of the Kd. In some embodiments, the immunological binding interactions are between a masked cytokine (in the presence or absence of a protease) and a target protein, such as a cytokine receptor. Immunological binding properties of proteins can be quantified using methods well known in the art. For example, one method comprises measuring the rates of cytokine receptor (e.g., IL-12R)/cytokine (e.g., IL-12) complex formation and dissociation, wherein those rates depend on the concentrations of the complex partners, the affinity of the interaction, and geometric parameters that equally influence the rate in both directions. Both the “on rate constant” (Kon) and the “off rate constant” (Koff) can be determined by calculation of the concentrations and the actual rates of association and dissociation. The ratio of Koff/Kon enables the cancelation of all parameters not related to affinity, and is equal to the dissociation constant Kd. See Davies et al., Annual Rev Biochem. 59:439-473, (1990).

[0492] In some aspects, a masked cytokine described herein binds to a target protein with about the same or higher affinity upon cleavage with a protease as compared to the parental cytokine that comprises a masking moiety but does not comprise a cleavable peptide. The target protein can be any cytokine receptor.

[0493] In some embodiments, a masked cytokine provided herein that does not comprise a cleavable peptide in the linker has a dissociation constant (Kd) of ≤1M, ≤150 nM, ≤100 nM, ≤50 nM, ≤10 nM, ≤1 nM, ≤0.1 nM, ≤0.01 nM, or ≤0.001 nM (e.g. 10-8 M or less, e.g. from 10-8 M to 10-13 M, e.g., from 10-9 M to 10-13 M) with the target protein. In some embodiments, a masked cytokine provided herein that comprises a cleavable peptide in the linker has a dissociation constant (Kd) of ≤1M, ≤150 nM, ≤100 nM, ≤50 nM, ≤10 nM, ≤1 nM, ≤0.1 nM, ≤0.01 nM, or 0.001 nM (e.g., 10-8 M or less, e.g. from 10-8 M to 10-13 M, e.g., from 10-9 M to 10-13 M) with the target protein prior to cleavable with a protease. In some embodiments, a masked cytokine provided herein that comprises a cleavable peptide in the linker has a dissociation constant (Kd) of ≤1M, ≤150 nM, ≤100 nM, ≤50 nM, ≤10 nM, ≤1 nM, ≤0.1 nM, ≤0.01 nM, or ≤0.001 nM (e.g., 10-8 M or less, e.g. from 10-8 M to 10-13 M, e.g., from 10-9 M to 10-13 M) with the target protein upon cleavage with a protease. In some embodiments, the cytokine or functional fragment thereof of a masked cytokine provided herein has a dissociation constant (Kd) of ≥500M, ≥250M, ≥200M, ≥150M, ≥100M, ≥50M, ≥10M, ≥1M, ≥500 nM, ≥250 nM, ≥150 nM, ≥100 nM, ≥50 nM, ≥10 nM, ≥1 nM, ≥0.1 nM, ≥0.01 nM, or ≥0.001 nM with the masking moiety of the masked cytokine. In some embodiments, the cytokine or functional fragment thereof of a masked cytokine provided herein has a dissociation constant (Kd) that is between about 200M and about 50 nM, such as about or at least about 175M, about or at least about 150M, about or at least about 125M, about or at least about 100M, about or at least about 75M, about or at least about 50M, about or at least about 25M, about or at least about 5M, about or at least about 1M, about or at least about 750 nM, about or at least about 500 nM, about or at least about 250 nM, about or at least about 150 nM, about or at least about 100 nM, about or at least about 75 nM, or about or at least about 50 nM. Assays for assessing binding affinity are well known in the art.

[0494] In some aspects, masked cytokines that exhibit a desired occlusion ratio are provided. The term “occlusion ratio” as used herein refers a ratio of (a) a maximum detected level of a parameter under a first set of conditions to (b) a minimum detected value of that parameter under a second set of conditions. In the context of a masked IL-12 polypeptide, the occlusion ratio refers to the ratio of (a) a maximum detected level of target protein (e.g., IL-12R protein) binding to the masked IL-12 polypeptide in the presence of at least one protease capable of cleaving the cleavable peptide of the masked IL-12 polypeptide to (b) a minimum detected level of target protein (e.g., IL-12R protein) binding to the masked IL-12 polypeptide in the absence of the protease. Thus, the occlusion ratio for a masked cytokine can be calculated by dividing the EC50 of the masked cytokine pre-cleavage by the EC50 of the masked cytokine post-cleavage. The occlusion ratio of a masked cytokine can also be calculated as the ratio of the dissociation constant of the masked cytokine before cleavage with a protease to the dissociation constant of the masked cytokine after cleavage with a protease. In some embodiments, a greater occlusion ratio for the masked cytokine indicates that target protein bound by the masked cytokine occurs to a greater extent (e.g., predominantly occurs) in the presence of a protease capable of cleaving the cleavable peptide of the masked cytokine than iii the absence of a protease.

[0495] In some embodiments, masked cytokines with an optimal occlusion ratio are provided herein. In some embodiments, an optimal occlusion ratio of a masked cytokine indicates the masked cytokine has desirable properties useful for the methods or compositions contemplated herein. In some embodiments, a masked cytokine provided herein exhibits an optimal occlusion ratio of about 2 to about 10,000, e.g., about 80 to about 100. In a further embodiment of any of the masked cytokine provided herein, the occlusion ratio is about 2 to about 7,500, about 2 to about 5,000, about 2 to about 2,500, about 2 to about 2,000, about 2 to about 1,000, about 2 to about 900, about 2 to about 800, about 2 to about 700, about 2 to about 600, about 2 to about 500, about 2 to about 400, about 2 to about 300, about 2 to about 200, about 2 to about 100, about 2 to about 50, about 2 to about 25, about 2 to about 15, about 2 to about 10, about 5 to about 10, about 5 to about 15, about 5 to about 20, about 110 to about 100, about 20 to about 100, about 30 to about 100, about 40 to about 100, about 50 to about 100, about 60 to about 100, about 70 to about 100, about 80 to about 100, or about 100 to about 1,000. In some embodiments, a masked cytokine provided herein exhibits an optimal occlusion ratio of about 2 to about 1,000. Binding of a masked IL-12 polypeptide to a target protein before cleavage and/or after cleavage with a protease can be determined using techniques well known in the art such as by ELISA.

[0496] In some embodiments, a masking moiety described herein binds to a cytokine or functional fragment thereof as described herein with lower affinity than the affinity between the cytokine or functional fragment thereof and a target protein (e.g., cytokine receptor). In certain embodiments, a masking moiety provided herein binds to a cytokine or functional fragment thereof as described herein with a dissociation constant (Kd) of ≥500M, ≥250M, ≥200M, ≥150M, ≥100M, ≥50M, ≥10M, ≥1M, ≥500 nM, ≥250 nM, ≥150 nM, ≥100 nM, ≥50 nM, ≥10 nM, ≥1 nM, ≥0.1 nM, ≥0.01 nM, or ≥0.001 nM.

[0497] 4. Masked IL-12 Cytokine Production

[0498] The masked cytokines described herein are prepared using techniques available in the art, exemplary methods of which are described.

[0499] 4.1 Antibody Production

[0500] Some embodiments of the masked IL-12 cytokine comprise an antibody or fragment thereof. The following sections provide further detail on the production of antibodies and antibody fragments, variants, and derivatives thereof, that may be used in some embodiments of the masked IL-12 cytokine provided herein. In some embodiments, the masked cytokine is in the form of a dimer produced by two copies of a masked IL-12 cytokine that are associated through disulfide bonds.

[0501] 1. Antibody Fragments

[0502] The present invention encompasses, in some embodiments, antibody fragments. The antibody fragments can be any antibody fragments, such as an Fc domain, a portion of the heavy chain, a portion of the light chain, an Fab, an Fv, or an scFv, among other fragments. Antibody fragments may he generated by traditional means, such as enzymatic digestion, or by recombinant techniques. In certain circumstances, there are advantages of linking antibody fragments, rather than whole antibodies, to the masked cytokines described herein. For a review of certain antibody fragments, see Hudson et al, (2003) Nat, Med. 9:129-134.

[0503] Various techniques have been developed for the production of antibody fragments. Traditionally, these fragments were derived via proteolytic digestion of intact antibodies (see, e.g., Morimoto et al., Journal of Biochemical and Biophysical Methods 24:107-117 (1992); and Brennan et at., Science, 229:81 (1985)). However, these fragments can now be produced directly by recombinant host cells. Fab, Fv and ScFv antibody fragments can all be expressed in and secreted from E. coli and other cell types, such as HEK293 and CHO cells, thus allowing the facile production of large amounts of these fragments. Alternatively, Fab-SH fragments can he directly recovered from culture media and chemically coupled to form F(ab)2 fragments (Carter et al., Bio/Technology 10: 163-167 (1992)). According to another approach, F(ab)2 fragments can be isolated directly from recombinant host cell culture. Fab and F(ab)2 fragments with increased in vivo half-life comprising FERN salvage receptor binding epitope residues are described in U.S. Pat. No. 5,869,046. Other techniques for the production of antibody fragments for use in the masked cytokines will be apparent to the skilled practitioner. In certain embodiments, a masked cytokine comprises a single chain Fv fragment (scFv). See WO 93/16185; U.S. Pat. Nos. 5,571,894; and 5,587,458. scFv fusion proteins may be constructed to yield fusion of an effector protein at either the amino or the carboxy terminus of an say. See Antibody Engineering, ed. Borrebaeck, supra. Also, in some embodiments, bi-scFv comprising two scFvs linked via a polypeptide linker can be used with the masked cytokines.

[0504] The present invention includes, in some embodiments, a linear antibody (e.g., as described in U.S. Pat. No. 5,641,870) or a single chain immunoglobulin comprising heavy and light chain sequences of the antibody linked via an appropriate linker. Such linear antibodies or immunoglobulins may be monospecific or bispecific. Such a single chain immunoglobulin can be dimerized to thereby maintain a structure and activities similar to those of the antibody, which is originally a tetramer. Also, in some embodiments, the antibody or fragment thereof may be an antibody that has a single heavy chain variable region and has no light chain sequence. Such an antibody is called a single domain antibody (sdAb) or a nanobody. These antibodies are also encompassed in the meaning of the functional fragment of the antibody according to the present invention. Antibody fragments can be linked to the masked cytokines described herein according to the guidance provided herein.

[0505] 2. Humanized Antibodies

[0506] The invention encompasses, in some embodiments, humanized antibodies or antibody fragments thereof. In some embodiments, the humanized antibodies can be any antibodies, including any antibody fragment. Various methods for humanizing non-human antibodies are known in the art. For example, a humanized antibody can have one or more amino acid residues introduced into it from a source which is non-human. These non-human amino acid residues are often referred to as “import” residues, which are typically taken from an “import” variable domain. Humanization can be essentially performed following the method of Winter (Jones et al. (1986) Nature 321:522-525; Riechmann et al. (1988) Nature 332:323-327; Verhoeyen et al. (1988) Science 239:15:34-1536), by substituting hypervariable region sequences for the corresponding sequences of a human antibody. Accordingly. such “humanized” antibodies am chimeric antibodies (U.S. Pat. No. 4,816,567) wherein substantially less than an intact, human variable domain has been substituted by the corresponding sequence from a non-human species. In practice, humanized antibodies are typically human antibodies in which some hypervariable region residues and possibly some FR residues are substituted by residues from analogous sites in rodent antibodies. Humanized antibodies can be linked to the masked cytokines described herein according to the guidance provided herein.

### 3. HUMAN ANTIBODIES

[0507] Human antibodies of some embodiments of the invention can be constructed by combining Fv clone variable domain sequence(s) selected from human-derived phage display libraries with known human constant domain sequences(s). Alternatively, human monoclonal antibodies of sonic embodiments of the invention can be made by the hybridoma method, e.g., by using mouse, rat, bovine (e.g., cow), or rabbit cells, for example, to produce the human monoclonal antibodies. In some embodiments, the human antibodies and human monoclonal antibodies can be antibodies that bind to any antigen. In some embodiments, human monoclonal antibodies of the invention can be made by immunizing a non-human animal that comprises human immunoglobulin loci with the target antigen, and isolating the antibody from the immunized animal or from cells derived from the immunized animal Examples of suitable non-human animals include a transgenic or transchromosomic animal, such as HuMAb Mouse® (Medarex, Inc.), KM Mouse®, “TC mice,” and Xenomouse™. See, e g Lonberg, et al. (1994) Nature 368: 856-859; Fishwild, D. et al. (1996) Nature Biotechnology 14: 845-851; WO2002/43478; U.S. Pat. Nos. 5,939,598; 6,075,181; 6,114,598; 6,150,584; 6,162,963; and Tomizuka et al. (2000) Proc. Natl. Acad. Sci. USA 97:722-727.

[0508] Human myeloma and murine-human heteromyeloma cell lines for the production of human monoclonal antibodies have been described, for example, by Kozhor J. Immunol., 133: 3001 (19841; Brodeur et al., Monoclonal Antibody Production Techniques and Applications, pp. 51-63 (Marcel Dekker, Inc., New York, 1987); and Boerner et at., J. Immunol., 147: 86 (1991). Human antibodies can be linked to the masked cytokines described herein according to the guidance provided herein.

### 4. BISPECIFIC ANTIBODIES

[0509] Bispecific antibodies are monoclonal antibodies that have binding specificities for at least two different antigens. In certain embodiments, bispecilic antibodies are human or humanized antibodies. In some embodiments, one of the binding specificities is for a first antigen and the other binding specificity is for a second antigen, which may be either two different epitopes on the same target protein, or two different epitopes on two different target proteins. Bispecific antibodies may also be used to localize cytotoxic agents to cells which express the first antigen and/or the second antigen. Bispecific antibodies may also be used to recruit cells, such as T cells or natural killer cells, to kill certain cells, e.g., cancer cells, Bispecific antibodies can be prepared as full-length antibodies or antibody fragments (e.g. F(ab′)2 bispecific antibodies). Bispecific antibodies can be linked to the masked cytokines described herein according to the guidance provided herein.

[0510] Methods for making bispecific antibodies are known in the art. See Milstein and Cuello, Nature, 305: 537 (1983), WO 93/08829 published May 13, 1993, Traunecker et al., EMBO J., 10: 3655 (1991); Kontermann and Brinkmann, Drug Discovery Today, 20(7):838-847. For further details of generating bispecific antibodies see, for example, Suresh et al., Methods in Enzymology, 121:210 (1986). Bispecific antibodies include cross-linked or “heteroconjugate” antibodies. For example, one of the antibodies in the heteroconjugate can be coupled to avidin, the other to biotin. Heteroconjugate antibodies may be made using any convenient cross-linking method. Suitable cross-linking agents are well known in the art, and are disclosed in U.S. Pat. No. 4,676,980, along with a number of cross-linking techniques.

[0511] 5. Single-Domain Antibodies

[0512] In some embodiments, a single-domain antibody is linked to the masked cytokine in accordance with the guidance provided herein. The single-domain antibody can be any antibody. A single-domain antibody is a single polypeptide chain comprising all or a portion of the heavy chain variable domain or all or a portion of the light chain variable domain of an antibody. In certain embodiments, a single-domain antibody is a human single-domain antibody (Domantis, Inc., Waltham, Mass.; see, e.g., U.S. Pat. No. 6,248,516 B1). In some embodiments, a single-domain antibody consists of all or a portion of the heavy chain variable domain of an antibody, in some embodiment, the single domain antibody is a camelid-derived antibody obtained by immunization of a camelid with the target antigen. In some embodiments, the single domain antibody is a shark-derived antibody obtained by immunization of a shark with the target antigen, in some embodiments, the single domain antibody is a Nanobody (see, e.g., WO 2004041865A2 and US20070269422A1),

[0513] 6. Antibody Variants

[0514] In some embodiments, amino acid sequence modification(s) of the antibodies or fragments thereof described herein are contemplated. For example, it may be desirable to improve the FcRn-binding affinity and/or pH-dependent FcRn-binding affinity of the antibody. It may also be desirable to promote heterodimerization of antibody heavy chains by introducing certain amino acid modifications. Methods for promoting heterodimerization of antibody chains, including certain modifications that can be made to facilitate heterodimerization is described by Klein et al. (2012), MAbs, 4(6): 653-663.

[0515] Amino acid sequence variants of the antibody may be prepared by introducing appropriate changes into the nucleotide sequence encoding the antibody, or by peptide synthesis. Such modifications include, for example, deletions from, and/or insertions into and/or substitutions of, residues within the amino acid sequences of the antibody. Any combination of deletion, insertion, and substitution can be made to arrive at the final construct, provided that the final construct possesses the desired characteristics. The amino acid alterations may be introduced in the subject antibody amino acid sequence at the time that sequence is made.

[0516] A useful method for identification of certain residues or regions of the antibody that are preferred locations for mutagenesis is called “alanine scanning mutagenesis” as described by Cunningham and Wells (1989) Science, 244:1081-1085. Here, a residue or group of target residues are identified (e.g., charged residues such as arg, asp, his, lys, and glu) and replaced by a neutral or negatively charged amino acid (e.g., alanine or polyalanine) to affect the interaction of the amino acids with antigen. Those amino acid locations demonstrating functional sensitivity to the substitutions then are refined by introducing further or other variants at, or for, the sites of substitution. Thus, while the site for introducing an amino acid sequence variation is predetermined, the nature of the mutation per se need not be predetermined. For example, to analyze the performance of a mutation at a given site, ala scanning or random mutagenesis is conducted at the target codon or region and the expressed immunoglobulins are screened for the desired activity.

[0517] Amino acid sequence insertions include amino- and/or carboxyl-terminal fusions ranging in length from one residue to polypeptides containing a hundred or more residues, as well as intrasequence insertions of single or multiple amino acid residues. Examples of terminal insertions include an antibody with an N-terminal methionyl residue. Other insertional variants of the antibody molecule include the fusion to the N- or C-terminus of the antibody to an enzyme or a polypeptide which increases the serum half-life of the antibody.

[0518] In some embodiments, the masked cytokine is modified to eliminate, reduce, or otherwise hinder protease cleavage near the hinge region, The “hinge region” of an IgG is generally defined. as including E216 and terminating at P230 of human IgG1 according to the EU index as in Kahat, but, functionally, the flexible portion of the chain may be considered to include additional residues termed the upper and lower hinge regions, such as from E216 to G237 (Roux et al., 1998 J Immunol 161:4083) and the lower hinge has been referred to as residues 233 to 239 of the Fc region where FcyR binding was generally attributed. Modifications to any of the masked cytokines described herein, can be performed, for example, according to the methods described in US 20150139984A1, which is incorporated herein by reference, as well as by incorporating any of the modifications described therein.

[0519] In some embodiments, FcRn mutations that improve pharmacokinetics include, but are not limited to, M428L, T250Q/M428L, M252Y/S254T/T256E, P257I/N434H, D376V/N434H, P257I/Q3111, N434A, N434W, M428L/N434S, V258I/V308F, M252Y/S254T/T256E, V259I/V308F/M428L, T307Q/N434A, T307Q/N434S, T307Q/E380A/N434A, V308P/N434A, N434H, V308P. In some embodiments, such mutations enhance antibody binding to FcRn at low pH but do not change the antibody affinity at neutral pH.

[0520] In certain embodiments, an antibody or fragment thereof is altered to increase or decrease the extent to which the antibody is glycosylated. Glycosylation of polypeptides is typically either N-linked or Odinked. N-linked refers to the attachment of a carbohydrate moiety to the side chain of an asparagine residue. The tripeptide sequences asparagine-X-serine and asparagine-X-threonine. where X is any amino acid except proline, are the recognition sequences for enzymatic attachment of the carbohydrate moiety to the asparagine side chain. Thus, the presence of either of these tripeptide sequences in a polypeptide creates a potential glycosylation site. O-linked glycosylation refers to the attachment of one of the sugars N-aceytlgalactosamine, galactose, or xylose to a hydroxyamino acid, most commonly serine or threonine, although 5-hydroxyproline or 5-hydroxylysine may also be used.

[0521] Addition or deletion of glycosylation sites to the masked cytokine is conveniently accomplished by altering the amino acid sequence such that one or more of the above-described tripeptide sequences (for N-linked glycosylation sites) is created or removed. The alteration may also be made by the addition, deletion, or substitution of one or more serine or threonine residues to the sequence of the original antibody (for O-linked glycosylation sites).

[0522] Whom the antibody or fragment thereof comprises an Fc region, the carbohydrate attached thereto may be altered. For example, antibodies with a mature carbohydrate structure that lacks fucose attached to an Fc region of the antibody are described in US Pat Appl No US 2003/0157108 (Presta, L.). See also US 2004/0093621 (Kyowa Hakko Kogyo Co., Ltd). Antibodies with a bisecting N-acetylglucosamine (GlcNAc) in the carbohydrate attached to an Fc region of the antibody are referenced in WO 2003/011878, Jean-Mairet et al. and U.S. Pat. No. 6,602,684, Umana et al. Antibodies with at least one galactose residue in the oligosaccharide attached to an Fc region of the antibody are reported in WO1997/30087, Patel et at. See, also, WO 1998/58964 (Raju, S.) and WO 1999/22764 (Raju, S.) concerning antibodies with altered carbohydrate attached to the Fc region thereof. See also US 2005/0123546 (Umana et al.) on antigen-binding molecules with modified glycosylation.

[0523] In certain embodiments, a glycosylation valiant comprises an Fc region, wherein a carbohydrate structure attached to the Fc region lacks fucose or has reduced fucose. Such variants have improved ADCC function. Optionally, the Fc region further comprises one or more amino acid substitutions therein which further improve ADCC, for example, substitutions at positions 298, 333, and/or 334 of the Fc region (Eu numbering of residues). Examples of publications related to “defucosylated” or “fucose-deficient” antibodies include: US 2003/0157108; WO 2000/611739, WO 2001/29246; US 2003/0115614; US 2002/0164328; US 2004/0093621, US 2004/0132140; US 2004/0110704; US 2004/0110282; US 2004/0109865, WO 2003/085119; WO 2003/084570; WO 2005/035586, WO 2005/035778; WO2005/053742; Okazaki et al. J. Mol. Biol. 336:1239-1249 (2004); Yamane-Ohnuki et al. Biotech. Bioeng. 87: 614 (2004). Examples of cell lines producing defucosylated antibodies include Lee 13 CHO cells deficient in protein fucosylation (Ripka et at. Arch. Biochem. Biophys. 249:533-545 (1986); US Pat Appl No US 2003/0157108 A1, Presta, L; and WO 2004/056312 A1, Adams et al., especially at Example 11), and knockout cell lines, such as alpha-1,6-fucosyltransferase gene, FUT8, knockout CHO cells (Yamane-Ohnuki et al. Biotech. Bioeng. 87: 614 (2004)), and cells overexpressing (31,4-N-acetylglycosminyltransferase III (GnT-III) and Golgi p-marmosidase II (ManII).

[0524] In any of the embodiments herein, the masked cytokine can be engineered to improve antibody-dependent cell-mediated cytotoxicity (ADCC) activity. In some embodiments, the masked cytokine may be produced in a cell line having a alpha1,6-fucosyltransferase (Fut8) knockout. In some embodiments, the host cells have been modified to have reduced intrinsic alpha1,6-fucosylation activity. Examples of methods for modifying, the fucosylation pathways in mammalian host cells can be found in, e.g., Yamane-Ohnuki and Satoh, MAbs, 1(3): 230-236 (2009), the contents of which are incorporated herein by reference. Examples of methods and compositions for partially or completely inactivating the expression of the FUT8 gene can be found in, e.g., US Pub. No. 20160194665A 1; WO2006133148A2, the contents of which are incorporated herein by reference. In some embodiments, the masked cytokine is produced in the Lecl3 variant of CHO cells (see, e.g., Shields et Biol. Chem., 277(30):26733-40 (2002)) or the YB2/0 cell line having reduced FUT8 activity (see, e.g., Shinkawa et al., J. Biol. Chem., 278(5): 3466-73 (2003)). In some embodiments, small interfering RNA (siRNA) against genes relevant to alpha1,6-fucosylation can be introduced (see, e.g., Mori et al., Biotechnol. Bioeng. 88(7): 901-908 (2004); Imai-Nishiya et al., BMC Biotechnol. 7: 8-1 (2007); Omasa et al., J. Biosci. Bioeng., 106(2): 168-173 (2008)). In some further embodiments, the masked cytokine may be produced in a cell line overexpressing |31,4-N-acetylglycosminyltransferase III (GinT-III). In further embodiments, the cell line additionally overexpresses Golgi p-mannosidase II (ManII). In some of the embodiments herein, the masked cytokine may comprise at least one amino acid substitution in the Fc region that improves ADCC activity.

[0525] In some embodiments, the masked cytokine is altered to improve its serum half-life. To increase the serum half-life of the cytokine, one may incorporate a FcRN/salvage receptor binding epitope into a linked antibody (especially an antibody fragment) as described in U.S. Pat. No. 5,739,277, for example. As used herein, the term “salvage receptor binding epitope” refers to an epitope of the Fc region of an IgG molecule (e.g., IgG1, IgG2, IgG3, or IgG4) that is responsible for increasing the in vivo serum half-life of the IgG molecule (US 2003/0190311, U.S. Pat. Nos. 6,821,505; 6,165,745; 5,624,821; 5,648,260; 6,165,745; 5,834,597).

[0526] Another type of variant is an amino acid substitution variant. These variants have at least one amino acid residue in the antibody molecule replaced by a different residue. Sites of interest for substitutional mutagenesis include the hypervariable regions, but FR alterations are also contemplated. Conservative substitutions are shown in Table 3 under the heading of “preferred substitutions.” If such substitutions result in a desirable change in biological activity, then more substantial changes, denominated “exemplary substitutions” in Table 3, or as further described below in reference to amino acid classes, may be introduced and the products screened.

| Original | | Preferred |
|---|---|---|
| Residue | Exemplary Substitutions | Substitutions |
| Ala (A) | Val; Leu; Ile | Val |
| Arg (R) | Lys; Gln; Asn | Lys |
| Asn (N) | Gln; His; Asp; Lys; Arg | Gln |
| Asp (D) | Glu; Asn | Glu |
| Cys (C) | Ser; Ala | Ser |
| Gln (Q) | Asn; Glu | Asn |
| Glu (E) | Asp; Gln | Asp |
| Gly (G) | Ala | Ala |
| His (H) | Asn; Gln; Lys; Arg | Arg |
| Ile (D) | Leu; Val; Met; Ala; Phe; Norleucine | Leu |
| Leu (L) | Norleucine; Ile; Val; Met; Ala; Phe | Ile |
| Lys (K) | Arg; Gln; Asn | Arg |
| Met (M) | Leu; Phe; Ile | Leu |
| Phe (F) | Trp; Leu; Val; Ile; Ala; Tyr | Tyr |
| Pro (P) | Ala | Ala |
| Ser (S) | Thr | Thr |
| Thr (T) | Val; Ser | Ser |
| Trp (W) | Tyr; Phe | Tyr |
| Tyr (Y) | Trp; Phe; Thr; Ser | Phe |
| Val (V) | Ile; Leu; Met; Phe; Ala; Norleucine | Leu |

[0527] Substantial modifications in the biological properties of the antibody are accomplished by selecting substitutions that differ significantly in their effect on maintaining (a) the structure of the polypeptide backbone in the area of the substitution, for example, as a sheet or helical conformation, (b) the charge or hydrophobicity of the molecule at the target site, or c) the bulk of the, side chain. Amino acids may be grouped according to similarities in the properties of their side chains (in A. L. Lehninger, in Biochemistry, second ed., pp. 73-75, Worth Publishers, New York (1975)):

[0528] (1) non-polar: Ala (A), Val (V), Leu (L), lie (I), Pro (P), Phe (F), Trp (W), Met (M)

[0529] (2) uncharged polar: Gly (G), Ser (S), Thr (T), Cys (C), Tyr (Y), Asn (N), Gin (Q)

[0530] (3) acidic: Asp (D), Gin (E)

[0531] (4) basic: Lys (K), Arg (R), His (H)

[0532] Alternatively, naturally occurring residues may be divided into groups based on common side-chain properties:

[0533] (1) hydrophobic: Norleucine, Met, Ala, Val, Len, he;

[0534] (2) neutral hydrophilic: Cys, Ser, Asn, Gin;

[0535] (3) acidic: Asp, Glu;

[0536] (4) basic: His, Lys, Arg;

[0537] (5) residues that influence chain orientation: Gly, Pro;

[0538] (6) aromatic: Trp, Tyr, Phe.

[0539] Non-conservative substitutions will entail exchanging a member of one of these classes for another class. Such substituted residues also may be introduced into the conservative substitution sites or, into the remaining (non-conserved) sites.

[0540] Another type of substitutional variant involves the substitution of a naturally occurring amino acid residue for a non-naturally occurring amino acid residue, Non-naturally occurring amino acid residues can be incorporated, e.g., through tRNA recoding, or through any of the methods as described, e.g., in WO 2016154675A1, which is incorporated herein by reference.

[0541] One type of substitutional variant involves substituting one or more hypervariable region residues of a parent antibody (e.g., a humanized or human antibody). Generally, the resulting variant(s) selected for further development will have modified (e.g., improved) biological properties relative to the parent antibody from which they are generated. A convenient way for generating such substitutional variants involves affinity maturation using phage display, yeast display, or mammalian display. Briefly, several hypervariable region sites (e.g., 6-7 sites) are mutated to generate all possible amino acid substitutions at each site. The antibodies thus generated are displayed from filamentous phage particles as fusions to at least part of a phage coat protein (e.g., the gene III product of M13) packaged within each particle. The phage-displayed variants are then screened for their biological activity (e.g., binding affinity). In order to identify candidate hypervariable region sites for modification, scanning mutagenesis (e.g., alanine scanning) can be performed to identify hypervariable region residues contributing significantly to antigen binding. Alternatively, or additionally, it may be beneficial to analyze a crystal structure of the antigen-antibody complex to identify contact points between the antibody and antigen. Such contact residues and neighbouring residues are candidates for substitution according to techniques known in the art, including those elaborated herein. Once such variants are generated, the panel of variants is subjected to screening using techniques known in the art, including those described herein, and antibodies with superior properties in one or more relevant assays may be selected for further development.

[0542] Nucleic acid molecules encoding amino acid sequence variants of the masked cytokines are prepared by a variety of methods known in the art. These methods include, but are not limited to, isolation from a natural source (in the case of naturally occurring amino acid sequence variants) or preparation by oligonucleotide-mediated (or site-directed) mutagenesis, PCR mutagenesis, and cassette mutagenesis of an earlier prepared valiant or a non-variant version of the antibody, for example.

[0543] It may be desirable to introduce one or more amino acid modifications in an Fc region of antibodies of the invention, thereby generating an Fc region variant. The Fc region variant may comprise a human Fc region sequence (e.g., a human IgG1, IgG2, IgG3 or IgG4 Fc region) comprising an amino acid modification (e.g. a substitution) at one or more amino acid positions including that of a hinge cysteine.

[0544] In some embodiments, a masked cytokine provided herein includes an antibody or fragment thereof having an IgG1, IgG2, IgG3, or IgG4 isotype with enhanced effector function. In some embodiments, a masked cytokine provided herein includes an antibody or fragment thereof having an IgG1 isotype with enhanced effector function. In some embodiments, a masked cytokine provided herein has an IgG1 isotype with enhanced effector function. In some embodiments, the masked cytokine is afucosylated. In some embodiments, the, masked cytokine has increased levels of mannose moieties. In some embodiments, the masked cytokine has increased levels of bisecting glycan moieties. In some embodiments, the IgG1 comprises amino acid mutations.

[0545] In some embodiments, a masked cytokine provided herein includes an antibody having tm IgG1 isotype (e.g., a human IgG1 isotype). In some embodiments, the IgG1 comprises one or more amino acid substitutions that enhance effector function. In one embodiment, the IgG1 comprises the amino acid substitutions S298A, E333A, and K334A wherein the amino acid residues are numbered according to the EU index as in Kabat. In one embodiment, the IgG1 comprises the amino acid substitutions S239D and I332E wherein the amino acid residues are numbered according to the EU index as in Kabat. In one embodiment, the IgG4 comprises the amino acid substitutions S239D, A330L, and 1332E wherein the amino acid residues are numbered according to the EU index as in Kabat. In one embodiment, the IgG1 comprises the amino acid substitutions P247I and A339D or A339Q wherein the amino acid residues are numbered according to the EU index as in Kabat. In one embodiment, the IgG1 comprises the amino acid substitutions D280H, K290S with or without S298D or S298V wherein the amino acid residues are numbered according to the EU index as in Kabat. In one embodiment, the IgG1 comprises the amino acid substitutions F243L, R292P, and Y300L wherein the ammo acid residues are numbered according to the EU index as in Kabat. In one embodiment, the IgG1 comprises the amino acid substitutions F243L, R292P, Y300L, and P396L wherein the amino acid residues are numbered according to the EU index as in Kabat. In one embodiment, the IgG1 comprises the amino acid substitutions F243L, R292P, Y300L, V305I, and P396L wherein the amino acid residues are numbered according to the EU index as in Kabat. In one embodiment, the IgG1 comprises the amino acid substitutions G236A, S239D, and I332E wherein the amino acid residues are numbered according to the EU index as in Kabat. In one embodiment, the IgG1 comprises the amino acid substitutions K326A and E333A wherein the amino acid residues are numbered according to the EU index as in Kabat. In one embodiment, the IgG1 comprises the amino acid substitutions K326W and E333S wherein the amino acid residues are numbered according to the EU index as in Kabat. In one embodiment, the IgG1 comprises the amino acid substitutions K290E, S298G, T299A, with or without K326E wherein the amino acid residues are numbered according to the EU index as in Kabat. In one embodiment, the IgG1 comprises the amino acid substitutions K290N, S298G, T299A, with or without K326E wherein the amino acid residues are numbered according to the EU index as in Kabat. In one embodiment, the IgG1 comprises the amino acid substitution K334V wherein the amino acid residues are numbered according to the EU index as in Kabat. In one embodiment, the IgG1 comprises the amino acid substitutions L235S, S239D, and K334V wherein the amino acid residues are numbered according to the EU index as in Kabat. In one embodiment, the IgG1 comprises the amino acid substitutions K334V and Q331M, S239D, F243V, E294L, or S298T wherein the amino acid residues are numbered according to the EU index as in Kabat. In one embodiment, the IgG1 comprises the amino acid substitutions E233L, Q311M, and K334V wherein the amino acid residues are numbered according to the EU index as in Kabat. In one embodiment, the IgG1 comprises the amino acid substitutions L234I, Q311M, and K334V wherein the amino acid residues are numbered according to the EU index as in Kabat. In one embodiment, the IgG1 comprises the amino acid substitutions K334V and S298T, A330M, or A330F wherein the amino acid residues are numbered according to the EU index as in Kabat. In one embodiment, the IgG1 comprises the amino acid substitutions K334V, Q311M, and either A330M or A330F wherein the amino acid residues are numbered according to the EU index as in Kabat. In one embodiment, the IgG1 comprises the amino acid substitutions K334V, S298I, and either A330M or A330F wherein the amino acid residues are numbered according to the EU index as in Kabat. In one embodiment, the IgG1 comprises the amino acid substitutions K334V, S239D, and either A330M or S298T wherein the amino acid residues are numbered according to the EU index as in Kabat. In one embodiment, the IgG1 comprises the amino acid substitutions L234Y, Y296W, and K290Y, F243V, or E294L wherein the amino acid residues arc numbered according to the EU index as in Kabat. In one embodiment, the IgG1 comprises the amino acid substitutions Y296W and either L234Y or K290Y wherein the amino acid residues are numbered according to the EU index as in Kabat. In one embodiment, the IgG1 comprises the amino acid substitutions S239D, A330S, and I332E wherein the amino acid residues are numbered according to the EU index as in Kabat.

[0546] In some embodiments, the IgG1 comprises one or mote amino acid substitutions that decrease or inhibit effector function. In one embodiment, the IgG1 comprises the amino acid substitution N297A, N297G, or N297Q wherein the amino acid residues are numbered according to the EU index as in Kabat. In one embodiment, the IgG1 comprises the amino acid substitution L234A or L235A wherein the amino acid residues are numbered according to the EU index as in Kabat. In one embodiment, the IgG1 comprises the amino acid substitutions C220S, C226S, C229S, and P238S wherein the amino acid residues are numbered according to the EU index as in Kabat. In one embodiment, the IgG1 comprises the amino acid substitutions C226S, C229S, E233P, L234V, and L235A wherein the amino acid residues are numbered according to the EU index as in Kabat. In one embodiment, the IgG1 comprises the amino acid substitutions L234F, L235E, and P331S wherein the amino acid residues are numbered according to the EU index as in Kabat.

[0547] In one embodiment, the IgG1 comprises the amino acid substitutions S267E and L328F wherein the amino acid residues are numbered according to the EU index as in Kabat.

[0548] In accordance with this description and the teachings of the art, it is contemplated that in some embodiments, an antibody or fragment thereof of the masked cytokine may comprise one or more alterations as compared to the wild type counterpart antibody, e.g. in the Fc region. For example, it is thought that certain alterations can be made in the Fc region that would result in altered (i.e., either improved or diminished) C1q binding and/or Complement Dependent Cytotoxicity (CDC), e.g., as described in WO99/51642. See also Duncan & Winter Nature 322:738-40 (1988); U.S. Pat. Nos. 5,648,260; 5,624,821; and WO94/29351 concerning other examples of Fc region variants. WO00/42072 (Presto) and WO 20041056312 (Lowman) describe antibody variants with improved or diminished binding to FcRs. The content of these patent publications are specifically incorporated herein by reference. See also Shields et al. J. Biol. Chem, 9(2): 6591-6604 (2001). Antibodies with increased half-lives and improved binding to the neonatal Fc receptor (FcRn), which is responsible for the transfer of maternal IgGs to the fetus (Guyer et al., J. Immunol. 117:587 (1976) and Kim et at., J. Immunol. 24:249 (1994)), are described in US200510014934A1 (Hinton et al.). These antibodies comprise an Fc region with one or more substitutions therein which improve binding of the Fc region to FcRn. Polypeptide variants with altered Fc region amino acid sequences and increased or decreased C1q binding capability are described in U.S. Pat. No. 6,194,551B1, WO99/51642. The contents of those patent publications are specifically incorporated herein by reference. See, also, Idusogie et al. J. Immunol, 164: 4178-4184 (2000).

[0549] 4.2 Masked IL-12 Cytokine-Drug Conjugates

[0550] The invention also provides masked IL-12 cytokine-drug conjugates (MCDCs) comprising a masked IL-12 cytokine provided herein, which can be any IL-12 masked cytokine disclosed herein, conjugated to one or more agents. In some embodiments, the one or more agents is a cytotoxic agent, such as a chemotherapeutic agent or drug, growth inhibitory agent, toxin (e.g., protein toxin, enzymatically active toxin of bacterial, fungal, plant, or animal origin, or fragments thereof), or radioactive isotopes. In some embodiments, the one or more agents is an immune stimulant.

[0551] In some embodiments, the one or more drugs conjugated to the masked IL-12 cytokine includes, but is not limited to, a maytansinoid (see U.S. Pat. Nos. 5,208,020, 5,416,064 and European Patent EP 0 425 235 B1); act auristatin such as monomethylauristatin drug moieties DE and DF (MMAE and MMAF) (see U.S. Pat. Nos. 5,635,483 and 5,780,588, and 7,498,298); a dolastatin; a calicheamicin or derivative thereof (see U.S. Pat. Nos. 5,712,374, 5,714,586, 5,739,116, 5,767,285, 5,770,701, 5,770,710, 5,773,001, and 5,877,296; Hinman et ak, Cancer Res. 53:3336-3342 (1993); and Lode et ak, Cancer Res. 58:2925-2928 (1998)); an anthracycline such as daunomycin or doxorubicin (see Kratz et ak, Current Med. Chem. 13:477-523 (2006); Jeffrey et ak, Bioorganic & Med. Chem, Letters 16:358-362 (2006); Torgov et ak, Bioconj. Chem. 16:717-721 (2005); Nagy et ak, Proc. Natl. Acad. Sci. USA 97:829-834 (2000); Dubowchik et ak, Bioorg. & Med. Chem. Letters 12:1529-1532 (2002); King et ak, J. Med. Chem. 45:4336-4343 (2002); and U.S. Pat. No. 6,630,579); methotrexate; vindesine; a taxane such as docetaxel, paclitaxel, larotaxel, tesetaxel, and ortataxel; a trichothecene; and CC1065.

[0552] In another embodiment, the one or more drugs conjugated to the masked IL-12 cytokine includes, but is not limited to, an inhibitor of tribulin polymerization (e.g., maytansinoids and auristatins), DNA damaging agents (e.g., pyrrolobenzodiazepine (PBD) dime TS, calicheamicins, duocarmycins and indo-linobenzodiazepine dimers), and DNA synthesis inhibitors (e.g., exatecan derivative Dxd).

[0553] In another embodiment, a masked IL-12 cytokine-drug conjugate comprises a masked IL-12 cytokine as described herein conjugated to an enzymatically active toxin or fragment thereof, including, but not limited to, diphtheria A chain, nonbinding active fragments of diphtheria toxin, exotoxin A chain (from Pseudomonas aeruginosa), ricin A chain, abrin A chain, modeccin A chain, alpha-sarcin, Aleurites fordii proteins, dianthin proteins, Phytolaca americana proteins (PAPI, PAPII, and PAP-S), momordica charantia inhibitor, curcin, crotin, sapaonaria officinalis inhibitor, gelonin, mitogellin, restrictocin, phenomycin, enomycin, and the tricothecenes.

[0554] In another embodiment, a masked IL-12 cytokine-drug conjugate comprises a masked IL-12 cytokine as described herein conjugated to a radioactive atom to form a radioconjugate. A variety of radioactive isotopes are available for the production of radioconjugates. Examples include At211, 1131, 1125, Y90, Rel86, Rel88, Sml53, B1212, P32, Pb212 and radioactive isotopes of Lu. When the radioconjugate is used for detection, it may comprise a radioactive atom for scintigraphic studies, for example tc99m or 1123, or a spin label for nuclear magnetic resonance (NMR) imaging (also known as magnetic resonance imaging, mi), such as iodine-123 again, iodine-131, indium-111, fluorine-19, carbon-13, nitrogen-15, oxygen-17, gadolinium, manganese or iron.

[0555] In some embodiments, a masked IL-12 cytokine-drug conjugate comprises a masked IL-12 cytokine as described herein conjugated to one or more immune stimulants. In some embodiments, the immune stimulant is a stimulator of interferon genes (STING) agonist or a toll-like receptor (LER) agonist.

[0556] The STING agonist can be any agonist of STING. In some embodiments, the STING agonist is a cyclic dinucleotide (CDN). The CDN can be any CDN or derivative or variant thereof. In some embodiments, the STING agonist is a CDN selected from the group consisting of cGAMP, c-di-AMP, c-di-GMP, cAIMP, and c-di-IMP. In some embodiments, the STING agonist is a derivative or variant of a CDN selected from the group consisting of cGAMP, c-di-AMP, e-di-GMP, cAIMP, and c-di-IMP. In some embodiments, the STING agonist is 4-(2-chloro-6-fluorobenzyl)-N-(furan-2-ylmethyl)-3-oxo-3,4-dihydro-2H-benzo[b][1,4]thiazine-6-carboxamide, or a derivative or variant thereof. See, e.g., Sali et al. (2015) PloS Pathog., 11(12); e!005324.

[0557] The TLR agonist can be an agonist of any TLR, such as TLR1, TLR2, TLR3, TLR4, TLR5, TLR6, TLR7, TLR8, TLR9, or TLR10. In some embodiments, the TLR agonist is an agonist of a TLR expressed on the cell surface, such as TLR1, TLR2, TLR4, or TLR5. In some embodiments, the TLR agonist is an agonist of a TLR expressed intracellularly, such as TLR3, TLR7, TLR8, TLR9, or TLR10.

[0558] Conjugates of a masked IL-12 cytokine and a cytotoxic agent may be made using a variety of bifunctional protein coupling agents such as N-succinimidyl-3-(2-pyridyldithio) propionate (SPDP), succinimidyl-4-(N-maleimidomethyl) cyclohexane-1-carboxylate (SMCC), iminothiolane (IT), bifunctional derivatives of imidoesters (such as dimethyl adipimidate HC1), active esters (such as disuccinimidyl suberate), aldehydes (such as glutaraldehyde), bis-azido compounds (such as bis (p-azidobenzoyl) hexanediamine), bis-diazonium derivatives (such as bis-(p-diazoniumbenzoyl)-ethylenediamine), diisocyanates (such as toluene 2,6-diisocyanate), and bis-active fluorine compounds (such as 1,5-difluoro-2,4-dinitrobenzene). For example, a ricin immunotoxin can be prepared as described in Vitetta et ah, Science 238:1098 (1987). Carbon-14-labeled 1-isothiocyanatobenzyl-3-methyldiethylene triaminepentaacetic acid (MX-DTPA) is an exemplary chelating agent for conjugation of radionucleotide to an antibody. See WO94/11026. The linker may be a “cleavable linker” facilitating release of a cytotoxic drug in the cell. For example, an acid-labile linker, peptidase-sensitive linker, photolabile linker, dimethyl linker or disulfide-containing linker (Chari et ah, Cancer Res, 52:127-31 (1992); U.S. Pat. No. 5,208,020) may be used.

[0559] The MCDCs herein expressly contemplate, but are not limited to such conjugates prepared with cross-linker reagents including, but not limited to, BMPS, EMCS, GMBS, HBVS, LC-SMCC, MBS, MPBH, SBAP, SIA, SIAB, SMCC, SMPB, SMPH, sulfo-EMCS, sulfo-GMBS, sulfo-KMUS, sulfo-MBS, sulfo-SIAB, sulfa-SMCC, and sulfo-SMPB, and SVSB (succinimidyl-(4-vinylsulfonejbenzoate) which are commercially available (e.g., from Pierce Biotechnology, Inc., Rockford. Ill. U.S.A).

[0560] 4.3 Vectors, Host Cells, and Recombinant Methods

[0561] For recombinant production of a IL-12 masked cytokine of the invention, the one or more nucleic acids encoding it is isolated and inserted into a replicable vector for further cloning (amplification of the DNA) or for expression. DNA encoding the masked IL-12 cytokine, including components thereof, is readily isolated and sequenced using conventional procedures. Many vectors are available. The choice of vector depends in part on the host cell to be used. Generally, host cells are of either prokaryotic or enkatyotic (generally mammalian) origin. It will be appreciated that constant regions of any isotype of antibody or fragment thereof, when applicable, can be used for this purpose, including IgG, IgM, IgA, IgD, and IgE constant regions, and that such constant regions can be obtained from any human or animal species. In some embodiments, one vector is used to encode the IL-12 masked cytokine. In some embodiments, more than one vector is used to encode the masked IL-12 cytokine.

[0562] 1. Generating Masked IL-12 Cytokinec Using Prokaryotic Host Cells

[0563] a. Vector Construction

[0564] Polynucleotide sequences encoding polypeptide components of the masked cytokines of the invention can he obtained using standard recombinant techniques. Desired poly nucleotide sequences of an antibody or antibody fragment thereof may be isolated and sequenced from antibody producing cells such as hybridoma cells. Alternatively, poly nucleotides can be synthesized using nucleotide synthesizer or PGR techniques, or obtained from other sources. Once obtained, sequences encoding the components of the masked cytokine are inserted into a recombinant vector capable of replicating and expressing heterologous polynucleotides in prokaryotic hosts. Many vectors that are available and known in the art can be used for the purpose of the present invention. Selection of an appropriate vector will depend mainly on the size of the nucleic acids to be inserted into the vector and the particular host cell to be transformed with the vector. Each vector contains various components, depending on its function (amplification or expression of heterologous polynucleotide, or both) and its compatibility with the particular host cell in which it resides. The vector components generally include, but are not limited to an origin of replication, a selection marker gene, a promoter, a ribosome binding site (RBS), a signal sequence, the heterologous nucleic acid insert and a transcription terminator sequence.

[0565] In general, plasmid vectors containing replicon and control sequences which are derived from species compatible with the host cell are used in connection with these hosts. The vector ordinarily carries a replication site, as well as marking sequences which are capable of providing phenotypic selection in transformed cells. For example, E. coli is typically transformed using pBR322, a plasmid derived from an E. coli species. pBR322 contains genes-encoding ampicillin (Amp) and tetracycline (Tet) resistance and thus provides easy means for identifying transformed cells. pBR322, its derivatives, or other microbial plasmids or bacteriophage may also contain, or be modified to contain, promoters which can be used by the microbial organism for expression of endogenous proteins. Examples of pBR322 derivatives used for expression of particular antibodies are described in detail in Carter et ah, U.S. Pat. No. 5,648,237.

[0566] In addition, phage vectors containing replicon and control sequences that are compatible with the host microorganism can be used as transforming vectors in connection with these hosts. For example, bacteriophage such as 7GEM™-11 may be utilized in making a recombinant vector which can be used to transform susceptible host cells such as E. coli LE392.

[0567] The expression vector of the invention may comprise two or more promoter-cistron pairs, encoding each of the polypeptide components. A promoter is an untranslated regulatory sequence located upstream (5′) to a cistron that modulates its expression. Prokaryotic promoters typically fall into two classes, inducible and constitutive. Inducible promoter is a promoter that initiates increased levels of transcription of the cistron under its control in response to changes in the culture condition, e.g. the presence or absence of a nutrient or a change in temperature.

[0568] A large number of promoters recognized by a variety of potential host cells are well known. The selected promoter can he operably linked to cistron DNA encoding either chain of the masked cytokine by removing the promoter from the source DNA via restriction enzyme digestion and inserting the isolated promoter sequence into the vector of the invention. Both the native promoter sequence and many heterologous promoters may be used to direct amplification and/or expression of the target genes.

[0569] In some embodiments, heterologous promoters are utilized, as they generally permit greater transcription and higher yields of expressed target gene as compared to the native target polypeptide promoter.

[0570] Promoters suitable for use with prokaryotic hosts include the PhoA promoter, the [3-galactamase and lactose promoter systems, a tryptophan (trp) promoter system and hybrid promoters such as the tac or the trc promoter. However, other promoters that are functional in bacteria (such as other known bacterial or phage promoters) are suitable as well. Their nucleotide sequences have been published, thereby enabling a skilled worker operably to ligate them to cistrons encoding, for example, the target light and heavy chains for masked cytokines comprising a light and heavy chain (Sieben list et al. (1980) Cell 20: 269) using linkers or adaptors to supply any required restriction sites.

[0571] In one aspect of the invention, each cistron within the recombinant vector comprises a secretion signal sequence component that directs translocation of the expressed polypeptides across a membrane. In general, the signal sequence may be a component of the vector, or it may be a part of the target polypeptide DNA that is inserted into the vector. The signal sequence selected for the purpose of this invention should be one that is recognized and processed (i.e. cleaved by a signal peptidase) by the host cell. For prokaryotic host cells that do not recognize and process the signal sequences native to the heterologous polypeptides, the signal sequence is substituted by a prokaryotic signal sequence selected, for example, from the group consisting of the alkaline phosphatase, perticillinase, Ipp, or heat-stable enterotoxin II (STII) leaders, LamB, PhoE, PelB, OmpA and MBP. In one embodiment of the invention, the signal sequences used in both cistrons of the expression system are STII signal sequences or variants thereof.

[0572] In another aspect, the production of the polypeptide components according to the invention can occur in the cytoplasm of the host cell, and therefore does not require the presence of secretion signal sequences within each cistron. In that regard, for embodiments comprising immunoglobulin light and heavy chains, for example, the light and heavy chains are expressed with or without the sequences for the masking moiety, linker sequence, etc., folded and assembled to form functional immunoglobulins within the cytoplasm. Certain host strains (e.g., the E. coli trxB-strains) provide cytoplasm conditions that are favorable for disulfide bond formation, thereby permitting proper folding and assembly of expressed protein subunits. Proba and Pluckthun Gene, 159:203 (1995).

[0573] Masked cytokines of the invention can also be produced by using an expression system in which the quantitative ratio of expressed polypeptide components can be modulated in order to maximize the yield of secreted and properly assembled antibodies of the invention. Such modulation is accomplished at least in part by simultaneously modulating translational strengths for the polypeptide components.

[0574] Prokaryotic host cells suitable for expressing masked cytokines of the invention include Archaebacteria and Eubacteria, such as Gram-negative or Gram-positive organisms. Examples of useful bacteria include Escherichia (e.g., E. coli), Bacilli (e.g., B. subtilis), Enterobacteria, Pseudomonas species (e.g., P. aeruginosa), Salmonella typhimurium, Serratia marcescans, Klebsiella, Proteus, Shigella, Rhizobia, Vitreoscilla, or Paracoccus. In one embodiment, gram-negative cells are used. In one embodiment, E. coli cells arc used as hosts for the invention. Examples of E. coli strains include strain W3110 (Bachmann, Cellular and Molecular Biology, vol. 2 (Washington, D.C.: American Society for Microbiology, 1987), pp. 1190-1219; ATCC Deposit No. 27,325) and derivatives thereof, including strain 33D3 having genotype W3110 AfhuA (AtonA) ptr3 lac Iq lacL8 AompTA(nmpc-fepE) degP41 kanR (U.S. Pat. No. 5,639,635). Other strains and derivatives thereof, such as E. coli 294 (ATCC 31,446), E. coli B, E. colik 1776 (ATCC 31,537) and E. coli R V308(ATCC 31,608) are also suitable. These examples are illustrative rather than limiting. Methods for constructing derivatives of any of the above-mentioned bacteria having defined genotypes are known in the art and described in, for example, Bass et ah, Proteins, 8:309-314 (1990). It is generally necessary to select the appropriate bacteria taking into consideration replicability of the replicon in the cells of a bacterium. For example, E. coli, Serratia, or Salmonella species can be suitably used as the host when well-known plasmids such as pBR322, pBR325, pACYC177, or pKN410 are used to supply the replicon. Typically, the host cell should secrete minimal amounts of proteolytic enzymes, and additional protease inhibitors may desirably be incorporated in the cell culture.

[0575] b. Masked Cytokine Production

[0576] Host cells are transformed with the above-described expression vectors and cultured in conventional nutrient media modified as appropriate for inducing promoters, selecting transformants, or amplifying the genes encoding the desired sequences.

[0577] Transformation means introducing DNA into the prokaryotic host so that the DNA is replicable, either as an extrachromosomal element or by chromosomal integrant. Depending on the host cell used, transformation is done using standard techniques appropriate to such cells. The calcium treatment employing calcium chloride is generally used for bacterial cells that contain substantial cell-wall barriers. Another method for transformation employs polyethylene glycol/DMSO. Yet another technique used is electroporation.

[0578] Prokaryotic cells used to produce the masked cytokines of the invention are grown in media known in the art and suitable for culture of the selected host cells. Examples of suitable media include luria broth (LB) plus necessary nutrient supplements. In some embodiments, the media also contains a selection agent, chosen based on the construction of the expression vector, to selectively permit growth of prokaryotic cells containing the expression vector. For example, ampicillin is added to media for growth of cells expressing ampicillin resistant gene.

[0579] Any necessary supplements besides carbon, nitrogen, and inorganic phosphate sources may also be included at appropriate concentrations introduced alone or as a mixture with another supplement or medium such as a complex nitrogen source. Optionally, the culture medium may contain one or mom reducing agents selected from the group consisting of glutathione, cysteine, cystamine, thioglycollate, dithioerythritol and dithiothreitol.

[0580] The prokaryotic host cells are cultured at suitable temperatures. In certain embodiments, for E. coli growth, growth temperatures range from about 20° C. to about 39° C.; from about 25° C. to about 37° C.; or about 30° C. The pH of the medium may be any pH ranging from about 5 to about 9, depending mainly on the host organism. In certain embodiments, for E. coli, the pH is from about 6.8 to about 7.4, or about 7.0.

[0581] If an inducible promoter is used in the expression vector of the invention, protein expression is induced under conditions suitable for the activation of the promoter. In one aspect of the invention, PhoA promoters are used for controlling transcription of the polypeptides. Accordingly, the transformed host cells are cultured in a phosphate-limiting medium for induction. In certain embodiments, the phosphate-limiting medium is the C.R.A.P. medium (see, e.g., Simmons et ah, J. Immunol. Methods (2002), 263:133-147). A variety of other inducers may be used, according to the vector construct employed, as is known in the art.

[0582] In one embodiment, the expressed masked cytokines of the present invention are secreted into and recovered from the periplasm of the host cells. Protein recovery typically involves disrupting the microorganism, generally by such means as osmotic shock, sonication or lysis. Once cells are disrupted, cell debris or whole cells may be removed by centrifugation or filtration. The proteins may be further purified, for example, by affinity resin chromatography. Alternatively, proteins can be transported into the culture media and isolated therein. Cells may be removed horn the culture and the culture supernatant being filtered and concentrated for further purification of the proteins produced. The expressed polypeptides can be further isolated and identified using commonly known methods such as polyacrylamide gel electrophoresis (PAGE) and Western blot assay.

[0583] In one aspect of the invention, masked cytokine production is conducted in large quantity by a fermentation process. Various large-scale fed-batch fermentation procedures are available for production of recombinant proteins. Large-scale fermentations have at least 1000 liters of capacity, and n certain embodiments, about 1,000 to 100,000 liters of capacity. These fermenters use agitator impellers to distribute oxygen and nutrients, especially glucose. Small scale fermentation refers generally to fermentation in a fermentor that is no more than approximately 100 liters in volumetric capacity, and can range horn about 1 liter to about 100 liters.

[0584] In a fermentation process, induction of protein expression is typically initiated after the cells have been grown under suitable conditions to a desired density, e.g., an OD550 of about 180-220, at which stage the cells are in the early stationary phase. A variety of inducers may he used, according to the vector construct employed, as is known in the art and described above. Cells may be grown for shorter periods prior to induction. Cells are usually induced for about 12-50 hours, although longer or shorter induction time may be used.

[0585] To improve the production yield and quality of the polypeptides of the invention, various fermentation conditions can be modified. For example, to improve the proper assembly and folding of, for example, secreted antibody polypeptides, additional vectors overexpressing chaperone proteins, such as Dsb proteins (DsbA, DsbB, DsbC, DsbD and or DsbG) or FkpA (a peptidylprolyl cis,trans-isomerase with chaperone activity) can be used to co-transform the host prokaryotic cells. The chaperone proteins have been demonstrated to facilitate the proper folding and solubility of heterologous proteins produced in bacterial host cells. Chen et al. (1999) J. Biol. Chem. 274:19601-19605; Georgiou et ak, U.S. Pat. No. 6,083,715; Georgiou et ak, U.S. Pat. No. 6,027,888; Bothmaim and Pluckthun (2000) J. Biol. Chem. 275:17100-17105; Ramm and Pluckthun (2000) J. Biol. Chem. 275:17106-17113; Arie et ak (2001) Mol. Microbiol. 39:199-210.

[0586] To minimize proteolysis of expressed heterologous proteins (especially those that are proteolytically sensitive), certain host strains deficient for proteolytic enzymes can be used for the present invention. For example, host cell strains may be modified to effect genetic mutation(s) in the genes encoding known bacterial proteases such as Protease III, OmpT, DegP, Tsp, Protease I, Protease Mi, Protease V, Protease VI and combinations thereof. Some E. coli protease-deficient strains are available and described in, for example, Joly et ak (1998), supra; Georgiou et ak, U.S. Pat. No. 5,264,365; Georgiou et. ak, U.S. Pat. No. 5,508,192; Kara et ak, Microbial Drug Resistance, 2:63-72 (1996).

[0587] In some embodiments, E. coli strains deficient for proteolytic enzymes and transformed with plasmids overexpressing, one or more chaperone proteins are used as host cells in the expression system of the invention.

[0588] c. Masked Cytokine Purification

[0589] In some embodiments, the masked cytokine produced herein is further purified to obtain preparations that are substantially homogeneous for further assays and uses. Standard protein purification methods known in the art cart be employed. The following procedures are exemplary of suitable purification procedures: fractionation on immunoaffinity or ion-exchange columns, ethanol precipitation, reverse phase HPLC, chromatography on silica or on a cation-exchange resin such as DEAE, chromatofocusing, SDS-PAGE, ammonium sulfate precipitation, and gel filtration using, for example, Sephadex G-75.

[0590] In some embodiments, Protein A immobilized on a solid phase is used for immunoaffinity purification of the masked cytokines of the invention. Protein A is a 41 kD cell wall protein from Staphylococcus aureas which binds with a high affinity to the Fc region of antibodies. Lindmark et al (1983) J. Immunol. Meth. 62:1-13. The solid phase to which Protein A is immobilized can be a column comprising a glass or silica surface, or a controlled pore glass column or a silicic acid column. In some applications, the column is coated with a reagent, such as glycerol, to possibly prevent nonspecific adherence of contaminants.

[0591] As the first step of purification, a preparation derived from the cell culture as described above can be applied onto a Protein A immobilized solid phase to allow specific binding of the masked cytokine of interest to Protein A. The solid phase would then be washed to remove contaminants non-specifically bound to the solid phase. Finally, the masked cytokine of interest is recovered from the solid phase by elution. Other methods of purification that provide for high affinity binding to a component of the masked cytokine can be employed in accordance with standard protein purification methods known in the art.

[0592] 2. Generating Masked Cytokines Using Eukaryotic Host Cells

[0593] A vector for use in a eukaryotic host cell generally includes one or more of the following non-limiting components: a signal sequence, an origin of replication, one or more marker genes, an enhancer element, a promoter, and a hanscription termination sequence.

[0594] a. Signal Sequence Component

[0595] A vector for use in a eukaryotic host cell may also contain a signal sequence or other polypeptide having a specific cleavage site at the N-terminus of the mature protein or polypeptide of interest. The heterologous signal sequence selected may be one that is recognized and processed (i.e., cleaved by a signal peptidase) by the host cell. In mammalian cell expression, mammalian signal sequences as well as viral secretory leaders, for example, the herpes simplex gD signal, are available.

[0596] The DNA for such a precursor region is ligated in reading frame to DNA encoding the masked cytokine.

[0597] b. Origin of Replication

[0598] Generally, an origin of replication component is not needed for mammalian expression vectors. For example, the SV40 origin may typically be used only because it contains the early promoter.

[0599] c. Selection Gene Component

[0600] Expression and cloning vectors may contain a selection gene, also termed a selectable marker. Typical selection genes encode proteins that (a) confer resistance to antibiotics or other toxins, e.g., ampicillin, neomycin, methotrexate, or tetracycline, (b) complement auxotrophic deficiencies, where relevant, or (c) supply critical nutrients not available from complex media.

[0601] One example of a selection scheme utilizes a drug to arrest growth of a host cell. Those cells that are successfully transformed with a heterologous gene produce a protein conferring drug resistance and thus survive the selection regimen. Examples of such dominant selection use the drugs neomycin, mycophenolic acid and hygromycin.

[0602] Another example of suitable selectable markers for mammalian cells are those that enable the identification of cells competent to take up the masked cytokine encoding nucleic acid, such as DHFR, thymidine kinase, metallothionein-I and -II, primate metallothionein genes, adenosine deaminase, ornithine decarboxylase, etc.

[0603] For example, in some embodiments, cells transformed with the DHFR selection gene are first identified by culturing all of the transformants in a culture medium that contains methotrexate (Mtx), a competitive antagonist of DHFR. In some embodiments, an appropriate host cell when wild-type DHFR is employed is the Chinese hamster ovary (CHO) cell line deficient in DHFR activity (e.g., ATCC CRL-9096).

[0604] Alternatively, host cells (particularly wild-type hosts that contain endogenous DHFR) transformed or co-transformed with DNA sequences encoding a masked cytokine, wild-type DHFR protein, and another selectable marker such as aminoglycoside 3′-phosphotransferase (APH) can be selected by cell growth in medium containing a selection agent for the selectable marker such as an aminoglycosidic antibiotic, e.g., kanamycin, neomycin, or G-418. See U.S. Pat. No, 4,965,199. Host cells may include NS0, including cell lines deficient is glutamine synthetase (GS). Methods for the use of GS as a selectable marker for mammalian cells are described in U.S. Pat. Nos. 5,122,464 and 5,891,693.

[0605] d. Promoter Component

[0606] Expression and cloning vectors usually contain a promoter that is recognized by the host organism and is operably linked to nucleic acid encoding a masked cytokine of interest, which can be any masked cytokine described herein. Promoter sequences are known for eukaryotes. For example, virtually all eukaryotic genes have an AT-rich region located approximately 25 to 30 bases upstream from the site where transcription is initiated. Another sequence found 70 to 80 bases upstream from the start of transcription of many genes is a CNCAAT region where N may be any nucleotide. At the 3′ end of most eukaryotic genes is am AATAAA sequence that may be the signal for addition of the poly A tail to the 3′ end of the coding sequence. In certain embodiments, any or all of these sequences may he suitably inserted into eukaryotic expression vectors.

[0607] Transcritihon front vectors in mammalian host cells is controlled, for example, by promoters obtained from the genomes of viruses such as polyoma virus, fowlpox virus, adenovirus (such as Adenovirus 2), bovine papilloma virus, avian sarcoma virus, cytomegalovirus, a retrovirus, hepahtis-B virus and Simian Virus 40 (SV40), from heterologous mammalian promoters, e.g., the actin promoter or an immunoglobulin promoter, from heat-shock promoters, provided such promoters are compatible with the host cell systems.

[0608] The early and late promoters of the SV40 virus are conveniently obtained as an SV40 restriction fragment that also contains the SV40 viral origin of replication. The immediate early promoter of the human cytomegalovirus is conveniently obtained as a HindIII E restriction fragment. A system for expressing DNA in mammalian hosts using the bovine papilloma virus as a vector is disclosed in U.S. Pat. No. 4,419,446. A modification of this system is described in U.S. Pat. No. 4,601,978. See also Reyes et ah, Nature 297:598-601 (1982), describing expression of human [3-interferon cDNA in murine cells under the control of a thymidine kinase promoter from herpes simplex virus. Alternatively, the Rous Sarcoma Virus long terminal repeat can be used as the promoter.

[0609] e. Enhancer Element Component

[0610] Transcription of DNA encoding a masked cytokine of this invention by higher eukaryotes is often increased by inserting an enhancer sequence into the vector. Many enhancer sequences are now known from mammalian genes (globin, elastase, albumin, a-fetoprotein, and insulin). Typically, however, one will use an enhancer from a eukaryotic cell virus. Examples include the SV40 enhancer on the late side of the replication origin (bp 100-270), the human cytomegalovirus early promoter enhancer, the murine cytomegalovirus early promoter enhancer, the polyoma enhancer on the late side of the replication origin, and adenovirus enhancers. See also Yaniv, Nature 297:17-18 (1982) (describing enhancer elements for activation of eukaryotic promoters). The enhancer may be spliced into the vector at a position 5′ or 3′ to the masked cytokine-encoding sequence, but is generally located at a site 5′ from the promoter.

[0611] f. Transcription Termination Component

[0612] Expression vectors used in eukaryotic host cells may also contain sequences necessary for the termination of transcription and for stabilizing the mRNA. Such sequences are commonly available from the 5′ and, occasionally 3′, untranslated regions of eukaryotic or viral DNAs or cDNAs. These regions contain nucleotide segments transcribed as polyadenylated fragments in the untranslated portion of the mRNA encoding a masked cytokine. One useful transcription termination component is the bovine growth hormone polyadenylation region. See WO94/11026 and the expression vector disclosed therein.

[0613] g. Selection and Transformation of Host Cells

[0614] Suitable host cells for cloning or expressing the DNA in the vectors herein include higher eukaryote cells described herein, including vertebrate host cells. Propagation of vertebrate cells in culture (tissue culture) has become a routine procedure. Examples of useful mammalian host cell lines are monkey kidney CV1 line transformed by SV40 (COS-7, ATCC CRL 1651); human embryonic kidney line (293 or 293 cells subcloned for growth in suspension culture, Graham et ah, J. Gen Virol. 36:59 (1977)); baby hamster kidney cells (BHP:, ATCC CCL 10); Chinese hamster ovary cells/-DHFR (CHO, Urlaub et ah, Proc. Natl. Acad. Sci. USA 77:4216 (1980)); marine sertoli cells (TM4, Mather, Biol. Reprod. 23:243-251 (1980)); monkey kidney cells (CV1 ATCC CCL 70); African green monkey kidney cells (VERO-76, ATCC CRL-1587); human cervical carcinoma cells (HELA, ATCC CCL 2); canine kidney cells (MDCK, ATCC CCL 34); buffalo rat liver cells (BEL 3A, ATCC CRL 1442); human lung cells (W138, ATCC CCL 75); human liver cells (Rep G2, HE 8065); mime mammary tumor (MMT 060562, ATCC CCL51); TRI cells (Mather et ah, Annals N.Y. Acad. Sci. 383:44-68 (1982)); MRC 5 cells; FS4 cells; and a human hepatoma line (Rep G2).

[0615] Host cells are transformed with the above-described-expression or cloning vectors for masked cytokine production and cultured in conventional nutrient media modified as appropriate for inducing promoters, selecting transformants, or amplifying the genes encoding the desired sequences.

[0616] h. Culturing Host Cells

[0617] The host cells used to produce masked cytokines of this invention may be cultured in a variety of media. Commercially available media such as Ham's F10 (Sigma), Minimal Essential Medium ((MEM), Sigma), RPMI-1640 (Sigma), and Dulbecco's Modified Eagle's Medium ((DMEM), Sigma) are suitable for culturing the host cells. In addition, any of the media described in Ham et ah, Meth. Ens. 58:44 (1979), Barnes et ah, Anal. Biochem. 102:255 (1980), U.S. Pat. No. 4,767,704; 4,657,866; A,921,162\ 4,560,655; or 5,122,469; WO 90/03430; WO 87/00195; or U.S. Pat. Re. 30,985 may be used as culture media for the host cells. Any of these media may he supplemented as necessary with hormones and/or other growth factors (such as insulin, transferrin, or epidermal growth factor), salts (such as sodium chloride, calcium, magnesium, and phosphate), buffers (such as HEPES), nucleotides (such as adenosine and thymidine), antibiotics (such as GENTAMYCIN™ drug), trace elements (defined as inorganic compounds usually present at final concentrations in the micromolar range), and glucose or an equivalent energy source. Any other supplements may also be included at appropriate concentrations that would he known to those skilled in the art. The culture conditions, such as temperature, pH, and the like, are those previously used with the host cell selected for expression, and will be apparent to the ordinarily skilled artisan.

[0618] i. Purification Masked Cytokines

[0619] When using recombinant techniques, the masked cytokines can be produced intracellularly, or directly secreted into the medium. If the masked cytokine is produced intracellularly, as a first step, the particulate debris, either host cells or lysed fragments, may be removed, for example, by centrifugation or ultrafiltration. Where the masked cytokine is secreted into the medium, supernatants from such expression systems may be first concentrated using a commercially available protein concentration filter, for example, an Amicon or Millipore Pellicon ultrafiltration unit. A protease inhibitor such as PMSF may be included in any of the foregoing steps to inhibit proteolysis, and antibiotics may be included to prevent the growth of adventitious contaminants.

[0620] The masked cytokine composition prepared from the cells can be purified using, for example, hydroxylapatite chromatography, gel electrophoresis, dialysis, and affinity chromatography, with affinity chromatography being a convenient technique. The suitability of protein A as an affinity ligand depends on the species and isotype of any immunoglobulin Fc domain, if any, that is present in the masked cytokine. Protein A can be used to purify antibodies that are based on human IgG1, IgG2, or IgG4 heavy chains (Lindmark et ak, J. Immunol. Methods 62:1-13 (1983)). Protein Ci is recommended for all murine isotypes and for human y3 (Guss et ak, EMBO J. 5:15671575 (1986)). The matrix to which the affinity ligand is attached may be agarose, but other matrices are available. Mechanically stable matrices such as controlled pore glass or poly(styrenedivinyl)benzene allow for faster flow rates and shorter processing times than can be achieved with agarose. Where the masked cytokine comprises a CH3 domain, the Bakerbond ABX™ resin (J. T. Baker, Phillipsburg, N.J.) is useful for purification.

[0621] Other techniques for protein purification such as fractionahon on an ion-exchange column, ethanol precipitation, Reverse Phase HPLC, chromatography on silica, chromatography on heparin SEPHAPOSE™ chromatography on an anion or cation exchange resin (such as a polyaspartic acid column), chromatofocusing, SDS-PAGE, and ammonium sulfate precipitation are also available depending on the masked cytokine to be recovered.

[0622] Following any preliminary purification step(s), the mixture comprising the masked cytokine of interest and contaminants may be subjected to further purification, for example, by low pH hydrophobic interaction chromatography using an elution buffer at a pH between about 2.5-4.5, performed at low salt concentrations (e.g., from about 0-0.25M salt).

[0623] In general, various methodologies for preparing masked cytokines for use in research, testing, and clinical use are well-established in the art, consistent with the above-described methodologies and/or as deemed appropriate by one skilled in the art for a particular masked cytokine of nerest.

### 5. COMPOSITIONS

[0624] In some aspects, also provided herein are compositions comprising any of the IL-12 masked cytokines described herein. In some embodiments, the composition comprises any of the exemplary embodiments of masked IL-12 cytokine described herein. In some embodiments, the composition comprises a dimer of any of the masked IL-12 cytokines described herein. In some embodiments, the composition is a pharmaceutical composition. In some embodiments, the composition comprises a masked IL-12 cytokine and farther comprises one or more of the components as described in detail below. For example, in some embodiments, the composition comprises one or more pharmaceutically acceptable carriers, excipients, stabilizers, buffers, preservatives, tonicity agents, non-ionic surfactants or detergents, or other therapeutic agents or active compounds, or combinations thereof. The various embodiments of the composition are sometimes referred to herein as formulations.

[0625] Therapeutic formulations are prepared for storage by mixing the active ingredient having the desired degree of purity with optional pharmaceutically acceptable carriers, excipients or stabilizers (Remington: The Science and Practice of Pharmacy, 20th Ed., Lippincott Williams & Wiklins, Pub., Geimaro Ed., Philadelphia, Pa. 2000), Acceptable carriers, excipients, or stabilizers are nontoxic to recipients at the dosages and concentrations employed, and include buffers, antioxidants including ascorbic acid, methionine, Vitamin E, sodium metabisulfite, preservatives, isotonicifiers, stabilizers, metal complexes (e.g. Zn-protein complexes); chelating agents such as EDTA and/or non-ionic surfactants.

[0626] Buffers can be used to control the pH in a range which optimizes the therapeutic effectiveness, especially if stability is pH dependent. Buffers can be present at concentrations ranging from about 50 mM to about 250 mM. Suitable buffering agents for use with the present invention include both organic and inorganic acids and salts thereof. For example, citrate, phosphate, succinate, tartrate, fumarate, gluconate, oxalate, lactate, acetate. Additionally, buffers may be comprised of histidine and trimethylamine salts such as Tris.

[0627] Preservatives can be added to prevent microbial growth, and are typically present in a range from about 0.2%-1.0% (w/v). Examples of suitable preservatives commonly used with therapeutics include octadecyldimetbylbenzyl ammonium chloride; hexamethonium chloride; benzalkonium halides (e.g., chloride, bromide, iodide), benzethonium chloride; thimerosal, phenol, butyl or benzyl alcohol; alkyl parabens such as methyl or propyl paraben; catechol; resorcinol; cyclohexanol, 3-pentanol, m-cresol, o-cresol, p-cresol, methyl p-hydroxybenzoate, propyl p-hydroxybenzoate, 2-phenoxyethanol, butyl p-hydroxybenzoate, 2-phenylethanol, ethanol, chlorobutanol, thiomerosal, bronopol, benzoic acid, imidurea, cldorohexidine, sodium dehydroacetate, chlorocresol, ethyl p-hydroxybenzoate, and chlorphenesine (3p-chlorphenoxypropane-1,2-diol).

[0628] Tonicity agents, sometimes known as “stabilizers” can be present to adjust or maintain the tonicity of liquid in a composition. When used with large, charged biomolecules such as proteins and antibodies, they are often termed “stabilizers” because they can interact with the charged groups of the amino acid side chains, thereby lessening the potential for inter and intra-molecular interactions.

[0629] Tonicity agents can he present in any amount between about 0.1% to about 25% by weight or between about 1 to about 5% by weight, taking into account the relative amounts of the other ingredients. In some embodiments, tonicity agents include polyhydric sugar alcohols, trihydric or higher sugar alcohols, such as glycerin, erythritol, arabitol, xylitol, sorbitol and mannitol.

[0630] Additional excipients include agents which can serve as one or more of the following: (1) bulking agents, (2) solubility enhancers, (3) stabilizers and (4) and agents preventing denaturation or adherence to the container wall. Such excipients include: polyhydric sugar alcohols (enumerated above); amino acids such as alanine, glycine, glutamine, asparagine, histidine, arginine, lysine, ornithine, leucine, 2-phenylalanine, glutamic acid, threonine, etc.; organic sugars or sugar alcohols such as sucrose, lactose, lactitol, trehalose, stachyose, mannose, sorbose, xylose, ribose, ribitol, myoinisitose, myoinisitol, galactose, galactitol, glycerol, cyclitols (e.g., inositol), polyethylene glycol; sulfur containing reducing agents, such as urea, glutathione, thioctic acid, sodium thioglycolate, thioglycerol, a-monothioglycerol and sodium thio sulfate; low molecular weight proteins such as human serum albumin, bovine scrum albumin, gelatin or other immunoglobulins; hydrophilic polymers such as polyvinylpyrrolidone; monosaccharides (e.g., xylose, mannose, fructose, glucose; disaccharides (e.g., lactose, maltose, sucrose); trisaccharides such as raffinose; and polysaccharides such as dextrin or dextran.

[0631] Non-ionic surfactants or detergents (also known as “wetting agents”) can be present to help solubilize the therapeutic agent as well as to protect the therapeutic protein against agitation-induced aggregation, which also permits the formulation to be exposed to shear surface stress without causing denaturation of the active therapeutic protein or antibody. Non-ionic surfactants are present in a range of about 0.05 mg/ml to about 1.0 mg/ml or about 0.07 mg/ml to about 0.2 mg/ml. In some embodiments, non-ionic surfactants are present in a range of about 0.001% to about 0.1% w/v or about 0.01% to about 0.1% w/v or about 0.01% to about 0.025% w/v.

[0632] Suitable non-ionic surfactants include polysorbates (20, 40, 60, 65, 80, etc.), polyoxamers (184, 188, etc.), PLURONIC® polyols, TRITON®, polyoxyethylene sorbitan monoethers (TWEEN®-20, TWEEN®-80, etc.), lauromacrogol 400, polyoxyl 40 stearate, polyoxyethylene hydrogenated castor oil 10, 50 and 60, glycerol monostearate, sucrose fatty acid ester, methyl callose and carboxymethyl cellulose. Anionic detergents that can be used include sodium lauryl sulfate, dioctyle sodium sulfosuccinate and dioctyl sodium sulfonate. Cationic detergents include benzalkonium chloride or benzethonium chloride.

[0633] In order for the formulations to be used for in vivo administration, they must be sterile. The formulation may be rendered sterile by filtration through sterile filtration membranes. The therapeutic compositions herein generally are placed into a container having a sterile access port, for example, an intravenous solution bag or vial having a stopper pierceable by a hypodermic injection needle.

[0634] The route of administration is in accordance with known and accepted methods, such as by single or multiple bolus or infusion over a long period of time in a suitable manner, e.g., injection or infusion by subcutaneous, intravenous, intraperitoneal, intramuscular, intraarterial, intralesional or intraarticular routes, topical administration, inhalation or by sustained release or extended-release means.

[0635] Any of the masked IL-12 cytokines described herein can be used alone or in combination with other therapeutic agents such is in the methods described herein. The term “in combination with” encompasses two or more therapeutic agents (e.g., a masked IL-12 cytokine and a therapeutic agent) that are included in the same or separate formulations. In some embodiments, “in combination with” refers to “simultaneous” administration, in which case administration of the masked IL-12 cytokine of the invention occurs simultaneously to the administration of the one or more additional therapeutic agents (e.g., at the same time or within one hour between administration (s) of the masked IL-12 cytokine and administration of the one or more additional therapeutic agents), In some embodiments, “in combination with” refers to sequential administration, in which case administration of the masked IL-12 cytokine of the invention occurs prior to and/or following, administration of the one or more additional therapeutic agents (e.g., greater than one hour between administration (s) of the masked IL-12 cytokine and administration of the one or more additional therapeutic agents). Agents contemplated herein include, but are not limited to, a cytotoxic agent, a cytokine, an agent targeting an immune checkpoint molecule, an agent targeting an immune stimulatory molecule, a growth inhibitory agent, an immune stimulatory agent, an anti-inflammatory agent, or an anti-cancer agent.

[0636] The formulation herein may also contain more than one active compound as necessary for the particular indication being treated, preferably those with complementary activities that do not adversely affect each other. Alternatively, or in addition, the composition may comprise a cytotoxic agent, cytokine, agent targeting an immune checkpoint molecule or stimulatory molecule, growth inhibitory agent, an immune stimulatory agent, an anti-inflammatory agent, or an anti-cancer agent. Such molecules are suitably present in combination in amounts that are effective for the purpose intended.

[0637] The formulation may be presented in any suitable state, such as a liquid formulation, a solid state (lyophilized) formulation, or a frozen formulation. Approaches for preparing each of these types of formulations for therapeutic use are well known in the art.

### 6. METHODS OF TREATMENT

[0638] Provided herein are methods for treating or preventing a disease in a subject comprising administering the subject an effective amount of any masked IL-12 cytokine described herein or compositions thereof. In some embodiments, methods are provided for treating or preventing a disease in a subject comprising administering to the subject any composition described herein. In some embodiments, the subject (e.g., a human patient) has been diagnosed with cancer or is at risk of developing such a disorder. In some embodiments, methods are provided for treating or preventing disease in a subject comprising administering to the subject an effective amount of any masked IL-12 cytokine described herein or compositions thereof, wherein the masked IL-12 cytokine is activated upon cleavage by an enzyme. In some embodiments, the masked IL-12 cytokine is activated at a tumor microenvironment. The masked IL-12 cytokine is therapeutically active after it has cleaved. Thus, in some embodiments, the active agent is the cleavage product.

[0639] For the prevention or treatment of disease, the appropriate dosage of an active agent will depend on the type of disease to be treated, as defined herein, the severity and course of the disease, whether the agent is administered for preventive or therapeutic purposes, previous therapy, the subject's clinical history and response to the agent, and the discretion of the attending physician. The agent is suitably administered to the subject at one time or over a series of treatments.

[0640] In some embodiments of the methods described herein, an interval between administrations of a masked IL-12 cytokine described herein is about one week or longer. In some embodiments of the methods described herein, an interval between administrations of a masked IL-I2 cytokine described herein is about two day s or longer, about three days or longer, about four days or longer, about five days or longer, or about six days or longer. In some embodiments of the methods described herein, an interval between administrations of a masked IL-12 cytokine described herein is about one week or longer, about two weeks or longer, about three weeks or longer, or about four weeks or longer. In some embodiments of the methods described herein, an interval between administrations of a masked IL-12 cytokine described herein is about one month or longer, about two months or longer, or about three months or longer. As used herein, an interval between administrations refers to the time period between one administration of the masked IL-12 cytokine and the next administration of the masked IL-12 cytokine. As used herein, an interval of about one month includes four weeks. In some embodiments, the treatment includes multiple administrations of the masked IL-12 cytokine, wherein the interval between administrations may vary. For example, in some embodiments, the interval between the first administration and the second administration is about one week, and the intervals between the subsequent administrations are about two weeks. In some embodiments, the interval between the first administration and the second administration is about two days, three days, four days, or five days, or six days, and the intervals between the subsequent administrations are about one week.

[0641] In some embodiments, the masked IL-12 cytokine is administered on multiple occasions over a period of time. The dosage that is administered to the subject on multiple occasions can, in some embodiments, be the same dosage for each administration, or, in some embodiments, the masked cytokine can be administered to the subject at two or more different dosages. For example, in some embodiments, a masked IL-12 cytokine is initially administered at one dosage on one or more occasions and is later administered at a second dosage on one or more occasions beginning at a later time point.

[0642] In some embodiments, a masked IL-12 polypeptide described herein is administered at a flat dose. In some embodiments, a masked IL-12 polypeptide described herein is administered to a subject at a dosage from about 25 mg to about 500 mg per dose. In some embodiments, the masked IL-12 polypeptide, is administered to a subject at a dosage of about 25 mg to about 50 mg, about 50 mg to about 75 mg, about 75 mg to about 100 mg, about 100 mg to about 125 mg, about 125 mg to about 150 mg, about 150 mg to about 175 mg, about 175 mg to about 200 mg, about 200 mg to about 225 mg, about 225 mg to about 250 mg, about 250 mg to about 275 mg, about 275 mg to about 300 mg, about 300 mg to about 325 mg, about 325 mg to about 350 mg, about 350 mg to about 375 mg, about 375 mg to about 400 mg, about 400 mg to about 425 mg, about 425 mt to about 450 mg, about 450 mg, to about 475 mg, or about 475 mg to about 500 mg per dose.

[0643] In some embodiments, a masked IL-12 polypeptide described herein is administered to a subject at a dosage based on the subject's weight or body surface area (BSA). Depending on the type and severity of the disease, about 1 μg/kg to 15 mg/kg (e.g. 0.1 mg/kg-10 mg/kg) of masked IL-12 polypeptide can be an initial candidate dosage for administration to the patient, whether, for example, by one or more separate administrations, or by continuous infusion. One typical daily dosage might range from about 1 μg/kg to 100 mg/kg or more, depending on the factors mentioned above. For repeated administrations over several days or longer, depending on the condition, the treatment would generally be sustained until a desired suppression of disease symptoms occurs. One exemplary dosage of the masked IL-12 polypeptide would be in the range from about 0.05 mg/kg to about 10 mg/kg. Thus, one or more doses of about 0.5 mg/kg, 2.0 mg/kg, 4.0 mg/kg or 10 mg/kg (or any combination thereof) may be administered to the patient. In some embodiments, a masked IL-12 polypeptide described herein is administered to a subject at a dosage from about 0.1 mg/kg to about 10 mg/kg or about 1.0 mg/kg to about 10 mg/kg. In some embodiments, a masked IL-12 polypeptide described herein is administered to a subject at a dosage of about any of 0.1 mg/kg, 0.5 mg/kg, 1.0 mg/kg, 1.5 mg/kg, 2.0 mg/kg, 2.5 mg/kg, 3.0 mg/kg, 3.5 mg/kg, 4.0 mg/kg, 4.5 mg/kg, 5.0 mg/kg, 5 mg/kg, 6.0 mg/kg, 6.5 mg/kg, 7.0 mg/kg, 7.5 mg/kg, 8.0 mg/kg, 8.5 mg/kg, 9.0 mg/kg, 9.5 mg/kg, or 10.0 mg/kg. In some embodiments, a masked IL-12 polypeptide described herein is administered to a subject at a dosage of about or at least about 0.1 mg/kg, about or at least about 0.5 mg/kg, about or at least about 1,0 mg/kg, about or at least about 1.5 mg/kg, about or at least about 2.0 mg/kg, about or at least about 2.5 mg/kg, about or at least about 3.0 mg/kg, about or at least about 3.5 mg/kg, about or at least about 4.0 mg/kg, about or at least about 4.5 mg/kg, about or at least about 5.0 mg/kg, about or at least about 5.5 mg/kg, about or at least about 6.0 mg/kg, about or at least about 6.5 mg/kg, about or at least about 7.0 mg/kg, about or at least about 7.5 mg/kg, about or at least about 8.0 mg/kg, about or at least about 8.5 mg/kg, about or at least about 9.0 mg/kg, about or at least about 9.5 mg/kg, about or at least about 10.0 mg/kg, about or at least about 15.0 mg/kg, about or at least about 20 mg/kg, about or at least about 30 mg/kg, about or at least about 40 mg/kg, about or at least about 50 mg/kg, about or at least about 60 mg/kg, about or at least about 70 mg/kg, about or at least about 80 mg/kg, about or at least about 90mg/kg, or about or at least about 100 mg/kg. Any of the dosing frequencies described above may be used.

[0644] A method of treatment contemplated herein is the treatment of a disorder or disease such as cancer with any of the masked IL-12 cytokines or compositions described herein. Disorders or diseases that are treatable with the formulations of this present invention include leukemia, lymphoma, head and neck cancer, colorectal cancer, prostate cancer, pancreatic cancer, melanoma, breast cancer, neuroblastoma, lung cancer, ovarian cancer, osteosarcoma, bladder cancer, cervical cancer, liver cancer, kidney cancer, skin cancer (e.g., Merkel cell carcinoma) or testicular cancer.

[0645] In some embodiments, provided herein is a method of treatment or prevention of a cancer by administration of any masked IL-12 cytokines or compositions described herein. In some embodiments, provided herein is a method of treatment or prevention of a cancer by administration of any IL-12 masked cytokine or composition described. herein in combination with an anticancer agent. The anti-cancer agent can be any agent capable of reducing cancer growth, interfering with cancer cell replication, directly or indirectly killing cancer cells, reducing metastasis, reducing tumor blood supply, or reducing cell survival. in some embodiments, the anti-cancer agent is selected. from the group consisting of a PD-1 inhibitor, an EGFR inhibitor, a HER2 inhibitor a VEGFR inhibitor, a CTLA-4 inhibitor, a BTLA inhibitor, a B7H4 inhibitor, a B7H3 inhibitor, a CSFIR inhibitor, an HVEM inhibitor, a CD27 inhibitor, a KIR inhibitor, an NKG2A inhibitor, an NKG2D agonist, a TWEAK inhibitor, an ALK inhibitor, a CD52 targeting antibody, a CCR4 targeting antibody, a PD-L1 inhibitor, a KIT inhibitor, a PDGFR inhibitor, a BAFF inhibitor, an HD AC inhibitor, a VEGF ligand inhibitor, a CD19 targeting molecule, a FOFR1 targeting molecule, a DFF3 targeting molecule, a DKK1 targeting molecule, a MUC1 targeting molecule, a MUG 16 targeting molecule, a PSMA targeting molecule, an MSFN targeting molecule, an NY-ES0-1 targeting molecule, a B7H3 targeting molecule, a B7H4 targeting molecule, a BCMA targeting molecule, a CD29 targeting molecule, a CD151 targeting molecule, a CD 123 targeting molecule, a CD33 targeting molecule, a CD37 targeting molecule, a CDH19 targeting molecule, a CEA targeting molecule, a Claudin 18.2 targeting molecule, a CFEC12A targeting molecule, an EGER VIII targeting molecule, an EPCAM targeting molecule, an EPHA2 targeting molecule, an FCRH5 targeting molecule, an FLT3 targeting molecule, a GD2 targeting molecule, a glypican 3 targeting molecule, a gpA33 targeting molecule, a GPRC5D targeting molecule, an IL-123R targeting molecule, an IL-1RAP targeting molecule, a MCSP targeting molecule, a RON targeting molecule, a ROR1 targeting molecule, a STEAP2 targeting molecule, a TfR targeting molecule, a CDI66 targeting molecule, a TPBG targeting molecule, a TROP2 targeting molectile, a proteasome inhibitor, an ABE inhibitor, a CD30 inhibitor, a FLT3 inhibitor, a MET inhibitor, a RET inhibitor, an IL-1(3 inhibitor, a MEK inhibitor, a ROS1 inhibitor, a BRAE inhibitor, a CD38 inhibitor, a RANKE inhibitor, a B4GALNT1 inhibitor, a SLAMF7 inhibitor, an IDH2 inhibitor, an mTOR inhibitor, a CD20 targeting antibody, a BTK inhibitor, a PI3K inhibitor, a FLT3 inhibitor, a PARP inhibitor, a CDK4 inhibitor, a CDK6 inhibitor, an EGFR inhibitor, a RAF inhibitor, a JAK1 inhibitor, a JAK2 inhibitor, a JAK3 inhibitor. an IL-6 inhibitor, a IL-17 inhibitor, a Smoothened inhibitor, an IL-6R inhibitor, a BCL2 inhibitor, a PTCH inhibitor, a PIGF inhibitor, a TGFB inhibitor, a CD28 agonist, a CD3 agonist, CD40 agonist, a GITR agonist, a 0X40 agonist, a VISTA agonist, a CD137 agonist, a LAG3 inhibitor, a TIM3 inhibitor, a TIGIT inhibitor, and an IL-12R inhibitor.

[0646] In some embodiments, provided herein is a method of treatment or prevention of a cancer by administration of any masked IL-12 cytokine described herein in combination with an anti-inflammatory agent. The anti-inflammatory agent can be any agent capable of preventing, counteracting, inhibiting, or otherwise reducing inflammation.

[0647] In some embodiments, the anti-inflammatory agent is a cyclooxygenase (COX) inhibitor. The COX inhibitor can be any agent that inhibits the activity of COX-1 and/or COX-2. In some embodiments, the COX inhibitor selectively inhibits COX-I (i.e., the COX inhibitor inhibits the activity of COX-1 more than it inhibits the activity of COX-2). In some embodiments, the COX inhibitor selectively inhibits COX-2 (i.e., the COX inhibitor inhibits the activity of COX-2 more than it inhibits the activity of COX-1). In some embodiments, the COX inhibitor inhibits both COX-1 and COX-2.

[0648] In some embodiments, the COX inhibitor is a selective COX-1 inhibitor and is selected from the group consisting of SC-560, FR122047, P6, mofezolac, TFAP, flurbiprofen, and ketoprofen. In some embodiments, the COX inhibitor is a selective COX-2 inhibitor and is selected from the group consisting of celecoxib, rofecoxib, meloxicam, piroxicam, deracoxib, parecoxib, valdecoxib, etoricoxib, a chromene derivative, a chtoman derivative, N-(2-cyclohexyloxynitrophenyl) methane sulfonamide, parecoxib, himiracoxib, RS 57067, T-614, BMS-347070, 1TE-522, S-2474, SVT-2016, CT-3, ABT-963, SC-58125, nimesulide, flosulide, NS-398, L-745337, RWJ-63556, L-784512, darbufelone, CS-502, LAS-34475, LAS-34555, S-33516, diclofenac, mefenamic acid, and SD-5381. In some embodiments, the COX inhibitor is selected front the group consisting of ibuprofen, naproxen, ketorolac, indomethacin, aspirin, naproxen, tolmetin, piroxicam, and meclofenamate. In some embodiments, the COX inhibitor is selected front the group consisting of SC-560, FR122047, P6, mofezolac, TFAP, flurbiprofen, ketoprofen, celecoxib rofecoxib, meloxicam, piroxicam, deracoxib, parecoxib, valdecoxib, etoricoxib, a chromene derivative, a chroman derivative, N-(2-cyclohexyloxynitrophenyl) methane sulfonamide, parecoxib, lumiracoxib, RS 57067, T-614, BMS-347070, ITE-522, S-2474, SVT-2016, CT-3, ABT-963, SC-58125, nimesulide, flosulide, NS-398, L-745337, RWJ-63556, L-784512, darbufelone, CS-502, LAS-34475, LAS-34555, S-33516, diclofenac, mefenamic acid, SD-8381, ibuprofen, naproxen, ketorolac, indomethacin, aspirin, naproxen, tolmetin, piroxicam, and meclofenamate.

[0649] In some embodiments, the anti-inflammatory agent is an NE-KB inhibitor. The NF-κB inhibitor can be any agent that inhibits the activity of the NF-κB pathway. In some embodiments, the NF-κB inhibitor is selected from the group consisting of an 1KK complex inhibitor, an IκB degradation inhibitor, an NF-κB nuclear translocation inhibitor, a p65 acetylation inhibitor, an NF-κB DNA binding inhibitor, an NF-κB transactivation inhibitor, and a p53 induction inhibitor.

[0650] In some embodiments, the IKK complex inhibitor is selected from the group consisting of TPCA-1, NF-κB Activation Inhibitor VI (BOT-64), BMS-345541, amlexanox, SC-514 (GK-01140), IMD-0354, and IKK-16. In some embodiments, the IκB degradation inhibitor is selected from the group consisting of BAY-11-7082, MG-115, MG-132, lactacystin, epoxomicin, parthenolide, carfilzomib, and MLN-4924 (pevonedistat). In some embodiments, the NF-κB nuclear translocation inhibitor is selected from the group consisting of ISH-23 and rolipram. In some embodiments, the p65 acetylation inhibitor is selected from the group consisting of gallic acid and anacardic acid. In some embodiments, the NE-KB DNA binding inhibitor is selected from the group consisting of FYY-4137, p-XSC, CV-3988, and prostaglandin E2 (PGE2). In some embodiments, the NF-κB transactivation inhibitor is selected from the group consisting of LY-294002, wortmannin, and mesalamine. In some embodiments, the p53 induction inhibitor is selected from the group consisting of quinacrine and flavopiridol. In some embodiments, the NF-κB inhibitor is selected from the group consisting of TPCA-1, NF-κB Activation inhibitor VI (BOT-64), BMS-345541, amlexanox, SC-514 (GK-01140), IMD-0354, IKK-16, BAY-11-7082, MG-115, MG-132, lactacystin, epoxotnicin, parthenolide, carfilzomib, MLN-4924 (pevonedistat), JSH-23 rolipram, gallic acid, anacardic acid, GYY-4137, p-XSC, CV-3988, prostaglandin E2 (PGE2), LY-294002, wortmannin, mesalamine, quinacrine, and flavopiridol.

[0651] In some embodiments, provided herein is a method of treatment or prevention of a cancer by administration of any masked IL-12 cytokine or composition described herein in combination with an anticancer therapeutic protein. The anti-cancer therapeutic protein can be any therapeutic protein capable of reducing cancer growth, interfering with cancer cell replication, directly or indirectly killing cancer cells, reducing metastasis, reducing tumor blood supply, or reducing cell survival. Exemplary anti-cancer therapeutic proteins may come in the form of an antibody or fragment thereof, an antibody derivative, a bispecific antibody, a chimeric antigen receptor (CAR) T cell, a fusion protein, or a bispecific T-cell engager (BiTE). In some embodiments, provided herein is a method of treatment or prevention of a cancer by administration of any masked IL-2 cytokine or composition described herein in combination with CAR-NK (Natural Killer) cells.

### 7. ARTICLES OF MANUFACTURE OR KITS

[0652] In another aspect, art article of manufacture or kit is provided which comprises any masked IL-12 cytokine described herein. The article of manufacture or kit may further comprise instructions for use of the cytokines in the methods of the invention. Thus, in certain embodiments, the article of manufacture or kit comprises instructions for the use of a masked cytokine in methods for treating or preventing a disorder (e.g., a cancer) in an individual comprising administering to the individual an effective amount of a masked cytokine. For example, in certain embodiments, the article of manufacture or kit comprises instructions for the use of a masked IL-12 polypeptide in methods for treating or preventing a disorder (e.g., a cancer) in an individual comprising administering to the individual an effective amount of a masked IL-12 polypeptide. In certain embodiments, the individual is a human, in some embodiments, the individual has a disease selected from the group consisting of include leukemia, lymphoma, head and neck cancer, colorectal cancer, prostate cancer, pancreatic cancer, melanoma, breast cancer, neuroblastoma, lung cancer, ovarian cancer, osteosarcoma, bladder cancer, cervical cancer, liver cancer, kidney cancer, skin cancer or testicular cancer.

[0653] The article of manufacture or kit may further comprise a container. Suitable containers include, for example, bottles, vials (e.g., dual chamber vials), syringes (such as single or dual chamber syringes), test tubes, and intravenous (IV) bags. The container may be formed front a variety of materials such as glass or plastic. The container holds the formulation. In some embodiments, the formulation is a lyophilized formulation. In some embodiments, the formulation is a frozen formulation. In some embodiments, the formulation is a liquid formulation.

[0654] The article of manufacture or kit may further comprise a label or a package insert, which is on or associated with the container, may indicate directions for reconstitution and/or use of the formulation. The label or package insert may further indicate that the formulation is useful or intended for subcutaneous, intravenous, or other modes of administration for treating or preventing a disorder (e.g., a cancer) in an individual. The container holding the formulation may be a single-use vial or a multi-use vial, which allows for repeat administrations of the reconstituted formulation. The article of manufacture or kit may further comprise a second container comprising a suitable diluent. The article of manufacture or kit may further include other materials desirable from a commercial, therapeutic, and user standpoint, including other buffers, diluents, filters, needles, syringes, and package inserts with instructions for use.

[0655] In a specific embodiment, the present invention provides kits for a single dose-administration unit. Such kits comprise a container of an aqueous formulation of therapeutic cytokine, including both single or multi-chambered pre-filled syringes. Exemplary pre-filled syringes are available from Vetter GmbH, Ravensburg, Germany.

[0656] The article of manufacture or kit herein optionally further comprises a container comprising a second medicament, wherein the masked cytokine is a first medicament, and which article or kit further comprises instructions on the label or package insert for treating the subject with the second medicament, in an effective amount.

[0657] In another embodiment, provided herein is an article of manufacture or kit comprising the formulations described herein for administration in an auto-injector device. An auto-injector can be described as an injection device that upon activation, will deliver its contents without additional necessary action from the patient or administrator. They are particularly suited for self-medication of therapeutic formulations when the delivery rate must be constant and the time of delivery is greater than a few moments.

### 8. DEFINITIONS

[0658] Unless defined otherwise, all terms of art, notations and other technical and scientific terms or terminology used herein are intended to have the same meaning as is commonly understood by one of ordinary skill in the art to which the claimed subject matter pertains. In some cases, terms with commonly understood meanings are defined herein for clarity and/or for ready reference, and the inclusion of such definitions herein should not necessarily be construed to represent a substantial difference over what is generally understood in the art.

[0659] It is to be understood that this invention is not limited to particular compositions or biological systems, which can, of course, vary. It is also to be understood that the terminology used herein is for the purpose of describing particular embodiments only, and is not intended to he limiting. As used in this specification and the appended claims, the singular forms “a,” “an,” and “the” include plural referents unless the content clearly dictates otherwise. Thus, for example, reference to “an IL-12 polypeptide” optionally includes a combination of two or more such polypeptides, and the like.

[0660] The term “about” as used herein refers to the usual error range for the respective value readily known to the skilled person in this technical field, Reference to “about” a value or parameter herein includes (and describes) embodiments that are directed to that value or parameter per se.

[0661] It is understood that aspects and embodiments of the invention described herein include “comprising,” “consisting,” and “consisting essentially of” aspects and embodiments.

[0662] As used herein, the term “and/or” refers to any one of the items, any combination of the items, or all of the items with which the term is associated. For instance, the phrase “A, B, and/or C” is intended to encompass each of the following embodiments: A, B, and C; A, B, or C; A or B; A or C; B or C; A and B; A and C; B and C; A and B or C; B and A or C; C and A or B; A (alone); B (alone); and C (alone).

[0663] The term “antibody” includes polyclonal antibodies, monoclonal antibodies (including full length antibodies which have an immunoglobulin Fc region), antibody compositions with polyepitopic specificity, multispecific antibodies (e.g., bispecific antibodies, diabodies, and single-chain molecules, as well as antibody fragments (e.g., Fab, F(ab′)2, and Fv). The term “immunoglobulin” (Ig) is used interchangeably with “antibody” herein.

[0664] The term “diabodies” refers to small antibody fragments with two antigen-binding sites, which comprise a heavy chain variable (VH) domain connected to a light chain variable (VL) domain in the same polypeptide chain (VH-VL).

[0665] The basic 4-chain antibody unit is a heterotetrameric glycoprotein composed of two identical light (L) chains and two identical heavy (H) chains An IgM antibody consists of 5 of the basic heterotetramer units along with an additional polypeptide called a J chain, and contains 10 antigen binding sites, while IgA antibodies comprise from 2-5 of the basic 4-chain units which can polymerize to form polyvalent assemblages in combination with the J chain. In the case of IgGs, the 4-chain unit is generally about 150,000 daltons. Each L chain is linked to an H chain by one covalent disulfide bond, while the two H chains are linked to each other by one or more disulfide bonds depending on the H chain isotype. Each H and L chain also has regularly spaced intrachain disulfide bridges. Each H chain has at the N-terminus, a variable domain (VH) followed by three constant domains (CH) for each of the a and y chains and four CH domains for p and s isotypes. Each L chain has at the N-terminus, a variable domain (VL) followed by a constant domain at its other end. The VL is aligned with the VH and the CL is aligned with the first constant domain of the heavy chain (CHI). Particular amino acid residues are believed to form an interface between the light chain and heavy chain variable domains. The pairing of a VH and VL together forms a single antigen-binding site. For the structure and properties of the different classes of antibodies, see e.g., Basic and Clinical Immunology, 8th Edition, Daniel P. Sties, Abba I. Terr and Tristram G. Parsolw (eds), Appleton & Lange, Norwalk, CT, 1994, page 71 and Chapter 6.

[0666] The L chain from any vertebrate species can be assigned to one of two clearly distinct types, called kappa and lambda, based on the amino acid sequences of their constant domains. Depending on the amino acid sequence of the constant domain of their heavy chains (CH), immunoglobulins can be assigned to different classes or isotypes. There are five classes of immunoglobulins: IgA, IgD, IgE, IgG and IgM, having heavy chains designated a, 8, e, y and p, respectively. The y and a classes are further divided into subclasses on the basis of relatively minor differences in the CH sequence and function, e.g., humans express the following subclasses: IgG1, IgG2, IgG3, IgG4, IgA1 and IgA2. IgG1 antibodies can exist in multiple polymorphic variants termed allotypes (reviewed in Jefferis and Lefranc 2009. mAbs Vol 1 Issue 4 1-7) any of which are suitable for use in the invention. Common allotypic variants in human populations are those designated by the letters a, f, n, z.

[0667] An “isolated” antibody is one that has been identified, separated and/or recovered from a component of its production environment (e.g., naturally or recombinantly). In some embodiments, the isolated polypeptide is free of association with all other components from its production environment. Contaminant components of its production environment, such as that resulting from recombinant transfected cells, are materials that would typically interfere with research, diagnostic or therapeutic uses for the antibody, and may include enzymes, hormones, and other proteinaceous or non-proteinaceous solutes. In some embodiments, the polypeptide is purified: (1) to greater than 95% by weight of antibody as determined by, for example, the Lowry method, and in some embodiments, to greater than 99% by weight; (1) to a degree sufficient to obtain at least 15 residues of N-terminal or internal amino acid sequence by use of a spinning cup sequenator, or (3) to homogeneity by SDS-PAGE under non-reducing or reducing conditions using Coomassie blue or silver stain. Isolated antibody includes the antibody in situ within recombinant cells since at least one component of the antibody's natural environment will riot be present. Ordinarily, however, an isolated polypeptide or antibody is prepared by at least one purification step.

[0668] The term “monoclonal antibody” as used herein refers to an antibody obtained from a population of substantially homogeneous antibodies, i.e., the individual antibodies comprising the population are identical except for possible naturally occurring mutations arid/or post-translation modifications (e.g., isomerizations, amidations) that may be present in minor amounts. In some embodiments, monoclonal antibodies have a C-terminal cleavage at the heavy chain and/or light chain. For example, 1, 2, 3, 4, or 5 amino acid residues are cleaved at the C-terminus of heavy chain and/or light chain. In some embodiments, the C-terminal cleavage removes a C-terminal lysine from the heavy chain, in some embodiments, monoclonal antibodies have an N-terminal cleavage at the heavy chain and/or light chain. For example, 1, 2, 3, 4, or 5 amino acid residues are cleaved at the N-terminus of heavy chain and/or light chain. In some embodiments truncated farms of monoclonal antibodies can be made by recombinant techniques. In some embodiments, monoclonal antibodies are highly specific, being directed against a single antigenic site. In some embodiments, monoclonal antibodies are highly specific, being directed against multiple antigenic sites (such as a bispecific antibody or a multispecific antibody). The modifier “monoclonal” indicates the character of the antibody as being obtained from a substantially homogeneous population of antibodies, and is not to be construed as requiring production of the antibody by any particular method. For example, the monoclonal antibodies to be used in accordance with the present invention may be made by a variety of techniques, including, for example, the hybridoma method, recombinant DNA methods, phage-display technologies, and technologies for producing human or human-like antibodies in animals that have parts or all of the human immunoglobulin loci or genes encoding human immunoglobulin sequences.

[0669] The terms “full-length antibody,” “intact antibody” or “whole antibody” are used interchangeably to refer to an antibody in its substantially intact form, as opposed to an antibody fragment. Specifically, whole antibodies include those with heavy and light chains including an Fc region. The constant domains may be native sequence constant domains (e.g., human native sequence constant domains) or amino acid sequence variants thereof. In some cases, the intact antibody may have one or more effector functions.

[0670] An “antibody fragment” comprises a portion of an intact antibody, such as the antigen binding region and/or the variable region of the intact antibody, and/or the constant region of the intact antibody. Examples of an antibody fragment include the Fc region of the antibody, a portion of the Fc region, or a portion of the antibody comprising the Fc region. Examples of antigen-binding antibody fragments include domain antibodies (dAbs), Fab, Fab′, F(ab′)2 and Fv fragments; diabodies; linear antibodies (see U.S. Pat. No. 5,641,870, Example 2; Zapata et ah, Protein Eng. 8(10): 1057-1062 [1995]); single-chain antibody molecules, and multispecific antibodies formed from antibody fragments. Single heavy chain antibodies or single light chain antibodies can be engineered, or in the case of the heavy chain, can be isolated from camelids, shark, libraries or mice engineered to produce single heavy chain molecules,

[0671] Papain digestion of antibodies produced two identical antigen-binding fragments, called “Fab” fragments, and a residual “Fc” fragment, a designation reflecting the ability to crystallize readily. The Fab fragment consists of an entire L chain along with the variable region domain of the H chain (VH), and the first constant domain of one heavy chain (CHI). Each Fab fragment is monovalent with respect to antigen binding, i.e., it has a single antigen-binding site. Pepsin treatment of an antibody yields a single large F(ab′)2 fragment which roughly corresponds to two disulfide linked Fab fragments having different antigen-binding activity and is still capable of cross-linking antigen. Fab fragments differ from Fab fragments by having a few additional residues at the carboxy terminus of the CHI domain including one or more cysteines from the antibody hinge region. Fab′-SH is the designation herein for Fab′ in which the cysteine residue(s) of the constant domains bear a free thiol group. F(ab′)2 antibody fragments originally were produced as pairs of Fab′ fragments which have hinge cysteines between them. Other chemical couplings of antibody fragments are also known. The Fc fragment comprises the carboxy-terminal portions of both H chains held together by disulfides. The effector functions of antibodies are determined by sequences and glycan in the Fc region, the region which is also recognized by Fc receptors (FcR) found on certain types of cells.

[0672] “Percent (%) amino acid sequence identity” with respect to a reference polypeptide sequence is defined as the percentage of amino acid residues in a candidate sequence that are identical with the amino acid residues in the reference polypeptide sequence, after aligning the sequences and introducing gaps, if necessary, to achieve the maximum percent sequence identity, and not considering any conservative substitutions as part of the sequence identity. Alignment for purposes of determining percent amino acid sequence identity can be achieved in various ways that are within the skill in the art, for instance, using publicly available computer software such as BLAST, BLAST-2, ALIGN or Megalign (DNASTAR) software. Those skilled in the art can determine appropriate parameters for aligning sequences, including any algorithms needed to achieve maximal alignment over the full length of the sequences being compared. For example, the % amino acid sequence identity of a given amino acid sequence A to, with, or against a given amino acid sequence B (which can alternatively be phrased as a given amino acid sequence A that has or comprises a certain % amino acid sequence identity to, with, or against a given amino acid sequence B) is calculated as follows:

100 times the fraction X/Y

[0673] where X is the number of amino acid residues scored as identical matches by the sequence in that program's alignment of A and B, and where Y is the total number of amino acid residues in B. It will be appreciated that where the length of amino acid sequence A is not equal to the length of amino acid sequence B, the % amino acid sequence identity of A to B will not equal the % amino acid sequence identity of B to A.

[0674] Antibody “effector functions” refer to those biological activities attributable to the Fc legion (a native sequence Fc region or amino acid sequence variant Fc region) of an antibody, and vary with the antibody isotype. Examples of antibody effector functions include: Clq binding and complement dependent cytotoxicity, Fc receptor binding; antibody-dependent cell-mediated cytotoxicity (ADCC); phagocytosis; down regulation of cell surface receptors (e.g., B cell receptors); and B cell activation.

[0675] “Binding affinity” as used herein refers to the strength of the non-covalent interactions between a single binding site of a molecule (e.g., a cytokine) and its binding partner (e.g., a cytokine receptor). In some embodiments, the affinity of a binding protein (e.g., a cytokine) can generally be represented by a dissociation constant (Kd). Affinity can he measured by common methods known in the art, including those described herein.

[0676] An “isolated” nucleic acid molecule encoding the cytokine polypeptides described herein is a nucleic acid molecule that is identified and separated from at least one contaminant nucleic acid molecule with which it is ordinarily associated in the environment in which it was produced. In some embodiments, the isolated nucleic acid is free of association with all components associated with the production environment. The isolated nucleic acid molecules encoding the polypeptides and cytokine polypeptides herein is in a form other than in the form or setting in which it is found in nature. Isolated nucleic acid molecules therefore are distinguished from nucleic acid encoding the polypeptides and cytokine polypeptides herein existing naturally in cells.

[0677] The term “pharmaceutical formulation” refers to a preparation that is in such form as to permit the biological activity of the active ingredient to be effective, and that contains no additional components that are unacceptably toxic to a subject to which the formulation would be administered.

[0678] Such formulations are sterile.

[0679] “Carriers” as used herein include pharmaceutically acceptable carriers, excipients, or stabilizers that are nontoxic to the cell or mammal being exposed thereto at the dosages and concentrations employed. Often the physiologically acceptable carrier is an aqueous pH buffered solution. Examples of physiologically acceptable carriers include buffers such as phosphate, citrate, and other organic acids; antioxidants including ascorbic acid; low molecular weight (less than about 10 residues) polypeptide; proteins, such as serum albumin, gelatin, or immunoglobulins, hydrophilic polymers such as polyvinylpyrrolidone; amino acids such as glycine, glutamine, asparagine, arginine or lysine; monosaccharides, disaccharides, and other carbohydrates including glucose, mannose, or dextrins; chelating agents such as EDTA; sugar alcohols such as mannitol or sorbitol; salt-forming counterions such as sodium; and/or nonionic surfactants such as TWEEN™, polyethylene glycol (PEG), and PLURONICS™.

[0680] As used herein, the term “treatment” refers to clinical intervention designed to alter the natural course of the individual or cell being treated during the course of clinical pathology. Desirable effects of treatment include decreasing the rate of disease progression, ameliorating or palliating the disease state, and remission or improved prognosis. An individual is successfully “treated”, for example, if one or more symptoms associated with a disorder (e.g., a neoplastic disease) are mitigated or eliminated For example, an individual is successfully “treated” if treatment results in increasing the quality of life of those suffering from a disease, decreasing the dose of other medications required for treating the disease, reducing the frequency of recurrence of the disease, lessening severity of the disease, delaying the development or progression of the disease, and/or prolonging survival of individuals.

[0681] As used herein, “in conjunction with” or “in combination with” refers to administration of one treatment modality in addition to another treatment modality. As such, “in conjunction with” or “in combination with” refers to administration of one treatment modality before, during or after administration of the other treatment modality to the individual.

[0682] As used herein, the term “prevention” includes providing prophylaxis with respect to occurrence or recurrence of a disease in an individual. An individual may be predisposed to, susceptible to a disorder, or at risk of developing a disorder, but has not yet been diagnosed with the disorder. In some embodiments, masked cytokines described herein are used to delay development of a disorder.

[0683] As used herein, an individual “at risk” of developing a disorder may or may not have detectable disease or symptoms of disease, and may or may not have displayed detectable disease or symptoms of disease prior to the treatment methods described herein. “At risk” denotes that an individual has one or more risk factors, which are measurable parameters that correlate with development of the disease, as known in the art. An individual having one or more of these risk factors has a higher probability of developing the disorder than an individual without one or more of these risk factors.

[0684] A “effective amount” refers to at least an amount effective, at dosages and for periods of time necessary, to achieve the desired or indicated effect, including a therapeutic or prophylactic result.

[0685] An effective amount can be provided in one or more administrations. A “therapeutically effective amount” is at least the minimum concentration required to effect a measurable improvement of a particular disorder. A therapeutically effective amount herein may vary according to factors such as the disease state, age, sex, and weight of the patient, and the ability of the antibody to elicit a desired response in the individual. A therapeutically effective amount may also be one in which any toxic or detrimental effects of the masked cytokine are outweighed by the therapeutically beneficial effects. A “prophylactically effective amount” refers to an amount effective, at the dosages and for periods of time necessary, to achieve the desired prophylactic result. Typically, but not necessarily, since a prophylactic dose is used in subjects prior to or at the earlier stage of disease, the prophylactically effective amount can be less than the therapeutically effective amount,

[0686] “Chronic” administration refers to administration of the medicament(s) in a continuous as opposed to acute mode, so as to main the initial therapeutic effect (activity) for an extended period of time. “Intermittent” administration is treatment that is not consecutively clone without interruption, but rather is cyclic in nature.

[0687] As used herein, an “individual” or a “subject” is a mammal. A “mammal” for purposes of treatment includes humans, domestic and farm animals, and zoo, sports, or pet animals, such as dogs, horses, rabbits, cattle, pigs, hamsters, gerbils, mice, ferrets, rats, cats, etc. In some embodiments, the individual or subject is human.

### 9. EXAMPLES

[0688] The invention will be more fully understood by reference to the following examples. They should not, however, be construed as limiting the scope of the invention. It is understood that the examples and embodiments described herein are for illustrative purposes only and that various modifications or changes in light thereof will be suggested to persons skilled in the art and are to be included within the spirit and. purview of this application and scope of the appended claims.

[0689] Although some examples describe the engineering, production, and/or testing of “masked” versions of an IL-2 polypeptide construct, some examples also employ parental “non-masked” versions of the IL-2 polypeptide construct, such as for comparison, or other constructs that include one or more of the components described herein that are tested as controls for comparison. Accordingly, the description of, for instance, testing done on masked IL-2 polypeptide constructs does not necessarily mean that non-masked versions of the construct were not also tested.

### Example 1

### Engineering of Masked IL-2 Polypeptides

[0690] Masked IL-2 polypeptide are generated in accordance with the teachings herein, In the subsequent examples, some experiments involve use of the masked IL-2 polypeptide constructs in monomer form, and some experiments involve use of the masked IL-2 constructs in dimer form, such as a dimer formed through disulfide bonds linking two copies of the same masked polypeptide construct (homodimer), or a heterodimer fanned by two different polypeptides (see, e.g., Table 5).

[0691] Masked IL-2 polypeptide constructs are generated that include an IL-2 polypeptide or functional fragment thereof, a masking moiety, and a half-life extension domain, such as an antibody or fragment thereof (e.g., an Fc region, heavy chain, and/or light chain). Some IL-2 polypeptide constructs are also generated that include an IL-2 polypeptide or functional fragment thereof linked to a half-life extension domain without also including a masking moiety. Some of the constructs also include a linker that comprises a cleavable peptide and links the masking moiety to the IL-2 polypeptide or functional fragment thereof, thereby resulting in an activatable masked IL-2 polypeptide construct, Some of the constructs also include a linker that links the IL-2 polypeptide or functional fragment thereof to the half-life extension domain. Some of the constructs also include a linker that links the IL-2 polypeptide or functional fragment thereof to the masking moiety. The masked IL-2 polypeptide constructs that do not include a cleavable peptide in the linker that links the IL-2 polypeptide or functional fragment thereof to the masking moiety are also referred to as non-activatable masked IL-2 polypeptide constructs or non-activatable IL-2 polypeptide constructs because they do not include a cleavable peptide. The structure and composition of exemplary IL-2 poly peptide constructs are provided in Table 3.

TABLE 3

| | Structure |
|---|---|
| Construct # | (N- to C-terminal direction) |
| AK032 | H-C |
| AK035 | H-C |

[0692] Also generated are masked IL-2 polypeptide constructs that include an IL-2 polypeptide or functional fragment thereof, a first masking moiety, a second masking moiety, and a half-life extension domain, such as albumin, an antibody or fragment thereof (e.g., an Fc region, heavy chain, and/or light chain), an albumin-binding peptide, an IgG-binding peptide, or a polyamino acid sequence. Some of the constructs also include a linker that links the first masking moiety to the IL-2 polypeptide or functional fragment thereof. Some of the constructs also include a linker that links the second masking moiety to the IL-2 polypeptide or functional fragment thereof. Some of the constructs include a cleavable peptide in the linker linking the first masking moiety to the IL-2 polypeptide or functional fragment thereof and/or the tinker linking the second masking moiety to the IL-2 polypeptide or functional fragment thereof, thereby resulting in an activatable masked IL-2 polypeptide construct. Some of the constructs also include a tinker linking the second masking moiety to the half-life extension domain. The masked IL-2 polypeptide constructs that do not include a cleavable peptide in either of the linkers that link the IL-2 polypeptide or functional fragment thereof to the first masking moiety or the second masking moiety are also referred to as non-activatable masked IL-2 polypeptide constructs or non-activatable IL-2 polypeptide constructs because they do not include a cleavable peptide. The structure and composition of exemplary IL-2 polypeptide constructs are provided in Table 4.

TABLE 4

| | Structure |
|---|---|
| Construct # | (N- to C- terminal direction) |
| AK041 | H-L1-MM1-L2-C-L3-MM2 |

[0693] Also generated are masked IL-2 polypeptide constructs that include art IL-2 polypeptide or functional fragment thereof, a masking moiety, a first half-life extension domain, and a second half-life extension domain, an antibody or fragment thereof (e.g., an Fc region, heavy chain, and/or light chain). The masking moiety is linked to the first half-life extension domain, the IL-2 polypeptide or functional fragment thereof is linked to the second half-life extension domain, and the first half-life extension domain and the second half-life extension domain contain modifications promoting the association of the first and the second half-life extension domain. In one exemplary embodiment, the masking moiety is linked to the first half-life extension domain, and the IL-2 polypeptide or functional fragment thereof is linked to the second half-life extension domain, and the first half-life extension domain and the second half-life extension domain contain modifications promoting the association of the first and the second half-life extension domain. In one exemplary embodiment of a non-masked IL-2 polypeptide construct, the embodiment comprises an IL-2 polypeptide or functional fragment thereof linked to a first half-life extension domain, and comprises a second half-life extension domain, where the IL-2 polypeptide or functional fragment thereof is linked to the first half-life extension domain, and the second half-life extension domain. Some of the constructs also include a linker that links the masking moiety to the first half-life extension domain, and/or a linker that links the IL-2 polypeptide or functional fragment thereof to the second half-life extension domain. The first and second half-life extension domain of some of the constructs are also linked. In some constructs, the first and second half-life extension domain of some of the constructs are linked by a linker. Some of the constructs include a cleavable peptide in the linker linking the masking moiety to the first half-life extension domain and/or the linker linking the IL-2 polypeptide or functional fragment thereof to the second half-life extension domain, thereby resulting in an activatable masked IL-2 polypeptide construct. The masked IL-2 polypeptide constructs that do not include a cleavable peptide in either the linker that links the IL-2 polypeptide or functional fragment thereof to the second half-life extension domain or the linker that links the masking moiety to the first half-life extension domain are also referred to as non-activatable masked IL-2 polypeptide constructs or non-activatable IL-2 polypeptide constructs because they do not include a cleavable peptide. The structure and composition of exemplary IL-2 polypeptide constructs are provided in Table 5.

TABLE 5

| Construct | Structure |
|---|---|
| # | (N- to C-terminal direction) |
| AK081 | H-L1-C |
| | H |
| AK109 | H-L1-MM |
| | H-C |
| AK110 | H-L1-MM |
| | H-C |
| AK111 | H-L1-C |
| | H-L1-MM |
| AK165 | H-L1-C |
| | H |
| AK166 | H-L1-C |
| | H-L1-MM |
| AK167 | H-L1-C |
| | H |
| AK168 | H-L1-C |
| | H-L1-MM |
| AK189 | H-L1-C |
| | H-L1-MM |
| AK190 | H-L1-C |
| | H-L1-MM |
| AK191 | H-L1-C |
| | H-L1-MM |
| AK192 | H-L1-C |
| | H-LI-MM |
| AK193 | H-L1-C |
| | H-L1-MM |
| AK197 | H-L1-C |
| | H-L1-MM |
| AK203 | H-L1-C |
| | H-L1-MM |
| AK209 | H-L1-C |
| | H-L1-MM |
| AK210 | H-L1-C |
| | H-L1-MM |
| AK211 | H-L1-C |
| | H-L1-MM |
| AK215 | H-L1-C |
| | H-L1-MM |
| AK216 | H-L1-C |
| | H-L1-MM |
| AK218 | H-L1-C |
| | H-L1-MM |
| AK219 | H-L1-C |
| | H-L1-MM |
| AK220 | H-L1-C |
| | H-L1-MM |
| AK223 | H-L1-C |
| | H-L1-MM |
| AK235 | H-L1-C |
| | H |
| AK253 | H-L1-C |
| | H |
| AK304 | H-L1-C |
| | H |
| AK305 | H-L1-C |
| | H-L1-MM |
| AK306 | H-L1-C |
| | H |
| AK307 | H-L1-C |
| | H-L1-MM |
| AK308 | H-L1-C |
| | H |
| AK309 | H-L1-C |
| | H-L1-MM |
| AK310 | H-L1-C |
| | H |
| AK311 | H-L1-C |
| | H-L1-MM |
| AK312 | H-L1-C |
| | H |
| AK313 | H-L1-C |
| | H-L1-MM |
| AK314 | H-L1-C |
| | H |
| AK315 | H-L1-C |
| | H-L1-MM |
| AK316 | H-L1-C |
| | H-L1-MM |

### Example 2

### In Vitro Characterization of Masked IL-2

[0694] The masked IL-2 polypeptide constructs generated in Example 1 are characterized using several cellular and functional assays in vitro.

[0695] Production

[0696] Plasmids encoding the constructs (e.g., masked IL-2 polypeptide constructs) were transfected into either Expi293 cells (Life Technologies A14527) or HEK293-6E cells (National Research Council; NRC). Transfections were performed using 1 mg of total DNA using PEIpro (Polyplus Transfection, 115-100) in a 1:1 ratio with the total DNA. The DNA and PEI were each added to 50 mL of OptiMem (Life Technologies 31985088) medium and sterile filtered. The DNA and PEI were combined for 10 minutes and added to the Expi293 cells with a cell density of 1.8−2.8×10⁶ cells/mL or 0.85−1.20×10⁶ cells/m, for expi29.3 cells or HEK293 cells, respectively, and a viability of at least 95%, The HEK293-6E transfection was performed with a cell density of and a viability of at least 95%, following the same protocol used for the Expi293 transfections. After 5-7 days, the cells were pelleted by centrifugation at 3000×g and the supernatant was filtered through a 0.2 μm membrane. Protein A resin (CaptivA, Reptigen CA-PRI-0005) was added to the filtered supernatant and incubated for at least 2 hours at 4° C. with shaking. The resin was packed into a column, washed with 15 column volumes of 20 mM citrate, pH 6.5, and then washed with 15 column volumes of 20 mM citrate, 500 mM sodium chloride, pH 6.5. The bound protein was eluted from the column with 20 mM citrate, 100 mM NaCl, pH 2.9.

[0697] The titer (mg/L) of exemplary constructs produced, including parental (e.g., non-masked) and masked constructs, is provided in Table 6, below.

TABLE 6

| Construct | Titer |
|---|---|
| ID | (mg/L) |
| AK032 | 5.8 |
| AK035 | 16.7 |
| AK081 | 23.5 |
| AK111 | 12.7 |
| AK165 | 13.5 |
| AK166 | 17.1 |
| AK167 | 56.4 |
| AK168 | 36.1 |
| AK203 | 83.2 |
| AK209 | 27.3 |
| AK211 | 43.8 |
| AK235 | 35.9 |
| AK253 | 41.4 |
| AK304 | 19.9 |
| AK305 | 53.2 |
| AK306 | 29.3 |
| AK307 | 62.9 |
| AK314 | 60 |
| AK315 | 59.8 |
| AK316 | 69.2 |
| AK308 | 74.5 |
| AK309 | 90.8 |
| AK310 | 44 |
| AK311 | 64.9 |
| AK312 | 154 |
| AK313 | 81.2 |

[0698] SDS-PAGE Analysis

[0699] For SDS-PAGE analysis, protein samples were made with 4×Laemmli sample buffer (BioRad Catalog Number 1610747). For the reduced samples, 0.1 M Bond Breaker TCEP Solution (Thermo Scientific 77720) was added and the samples were heated for 5 minutes at 65 ° C. The proteins were loaded into a 12-well NuPage 4-12% Bis-Tris Protein Gel (Invitrogen NP0322BOX), with 4 μg of protein loaded per well. The gel was stained using SimplyBlue SafeStain (Invitrogen LC6065).

[0700] As depicted in FIG. 4, SDS-PAGE analysis was performed on the flow-through (FT) samples (i.e., proteins that did not hind to the Protein A column) and the eluted (F) samples (i.e., proteins that bound to the Protein A column and were eluted from it) following production and purification of exemplary constructs (AK304, AK305, AK307, AK308, AK309, AK310, AK311, AK312, AK313, AK314, and AK315). This exemplary data demonstrates that constructs as described herein can be successfully produced and purified.

[0701] Reporter Bioassays

[0702] Reporter bioassays are performed on masked IL-2 polypeptide constructs, along with non-masked parental constructs or other controls, to monitor activation of a downstream pathway, such as the JAK-STAT pathway.

[0703] In some studies, HEIS-Blue IL-2 reporter cells (Invivogen) were used to test activation of the 1AK-STAT pathway in accordance with the following method. HEK-Blue IL-2 cells passage 6 (p6) (97% live) were washed 2× with assay medium (DMEM+10% heat-inactivated FBS), plated in 3 plated at 5e4 cells/well in 150 uL of assay medium, and rested in assay medium for about 2 hours to allow adherence to plate. Each construct tested was diluted to 300 pM in assay medium, then diluted 1:2 down the plate. 50 uL of each dilution was added, for a final starting concentration of 75 pM. HEK-Blue IL-2 cell supernatant was harvested after 24 hours, an incubated with Quantiblue (180 uL+20 uL supernatant), plus 3 wells/plate, of assay medium, at 37 deg C for 1 hour. The absorbance was read using a Biotek Neo2 at 625 nm.

[0704] In some studies, CTLL2 cells were used to test activation of the JAK-STAT pathway in accordance with the following method. CTLL2 cells were plated at 40,000 cell per well in RPMI with 10% FIBS. Dilutions of the constructs of interest were added and incubated at 37 degrees. After 6 hours, the Bio-Glo reagent was added and luminescence measured with a BioTek Synergy Neo2 plate reader.

[0705] Receptor Binding

[0706] The binding of the masked IL-2 polypeptide constructs generated in Example 1 is assessed. For the masked IL-2 polypeptide constructs, in some experiments, ELISA plates are coated with a receptor subunit, such as IL-2Rα (also referred to as CD25), IL-2Rβ (also referred to as CD122), or IL-2Rγ (also referred to as CD132), or combinations thereof. Dilutions of masked IL-2 polypeptide constructs are allowed to hind to the receptor subunit(s) and are detected using an anti-huFc-HRP detection antibody. The binding of the masked IL-2 polypeptide constructs is determined in conditions with arid without protease cleavage.

[0707] On-Cell Receptor Binding

[0708] The on-cell receptor binding of the masked IL-2 polypeptide constructs generated in Example 1 is assessed. Dilutions of masked IL-2 polypeptide constructs are allowed to bind to peripheral blood lymphocytes or tissue culture cells, such as CTLL2 cells and are detected by fluorescence activated cell sorting (FACS) using an anti-huFc-FITC or anti-albumin-FITC detection antibody. The binding of the masked IL-2 polypeptide constructs is determined in conditions with and without protease cleavage.

[0709] Receptor Binding Affinity

[0710] For SPR studies testing binding of masked and non-masked IL-2 polypeptide constructs, Reichert Carboxymethyl Dextran Hydrogel Surface Sensor Chips were coated and immobilized with the construct of interest (e.g., a masked IL-2 polypeptide construct or non-masked IL-2 polypeptide construct) at 30 ug/ml in 10 mM Sodium Acetate, pH 5.0 via amine coupling with EDC and NHS. Dilutions of CD25-Fc or Fc-CD122 in PEST (CD25: 16 nM, 8 nM, 4 nM, 2 nM, 1 nM and CD122: 500 nM, 250 nM, 125 nM, 62.5 nM, 31.25 nM) were prepared. Using a Reichert 4Channel SPR, dilutions of CD25 or CD122 were flowed over the clips with the immobilized construct to determine the on. rate at 25 degrees C. At equilibrium (approximately 3 minutes), the flow buffer was changed to PEST, to determine the off rates over 6 minutes. Between each run the chip was regenerated with 10 mM glycine pH 2.0.

[0711] FIGS. 5A-5D depicts the efficacy of mutations on IL-2 which prevent binding to its alpha-receptor, using SPR analysis that tested the binding of an exemplary masked IL-2 polypeptide construct (AK168) to CD25-Fc. FIG. 5A depicts the interaction between AK168 and CD25-Fc, FIG. 5B depicts the interaction between AK168 activated with MAW and CD25-Fc, and FIG. 5C depicts the interaction between a recombinant human IL-2 (rhIL-2) control and CD25-Fc. FIG. 5D provides a table summarizing the data obtained for the association constant (ka), dissociation constant (kd), equilibrium dissociation constant (KD), as well as the Chi2 value and U-value for each interaction. These results demonstrate that this exemplary masked IL-2 polypeptide construct (AK168) did not demonstrate detectable binding to CD25-Fc, while the wild-type rhIL-2 control did demonstrate detectable binding.

[0712] FIGS. 6A-6D depicts the masking of IL-2 towards its beta-receptor as well as restoration of binding post activation with protease, using SFR analysis that tested the binding of an exemplary masked IL-2 polypeptide construct (AK111) to CD122-Fc. FIG. 6A depicts the interaction between AK111 and CD122-Fc, FIG. 6B depicts the interaction between AK111 activated with MMP and CD122-Fc, and FIG. 6C depicts the interaction between a recombinant human IL-2 (rhIL-2) control and CD122-Fc. FIG. 6D provides a table summarizing the data obtained for the association constant (ka), dissociation constant (kd), equilibrium dissociation constant (KD), as well as the Chi2 value and U-value for each interaction. These results demonstrate that this exemplary masked IL-2 polypeptide construct (AK111) did not demonstrate detectable binding to CD122-Fc unless it has been activated with protease, while the rhIL-2 control did demonstrate detectable binding. Additional exemplary SPR data is provided below in Table 7 for various constructs tested, including masked and non-masked constructs. For some structures, when applicable, the KD was determined for the construct with or without having been previously cleaved by a protease.

TABLE 7

| | KD for CD25 | | KD for CD122 | | KD for CD122 |
|---|---|---|---|---|---|
| | (without protease | | (without protease | | (after protease |
| Construct | cleavage) | | cleavage) | | cleavage) |
| rhIL2 | 0.878 | nM | 124 | MM | N/A |
| AK032 | 1.76 | nM | 260 | nM | N/A |
| AK035 | No binding detected | | 110 | nM | N/A |
| AK081 | 0.875 | nM | 347 | nM | N/A |
| AK109 | 1.67 | nM | No binding detected | | 118 nM |
| AK110 | 0.911 | nM | No binding detected | | 195 nM |
| AK111 | 0.4 | nM | No binding detected | | 235 nM |
| AK168 | No binding detected | | Not determined | | 175 nM |
| AK215 | No binding detected | | | | |
| AK216 | No binding detected | | | | |
| AK218 | Weak binding | | | | |
| rhIL2 | 0.878 | nM | 124 | nM | N/A |
| AK032 | 1.76 | nM | 260 | nM | N/A |

| | | | | |
|---|---|---|---|---|
| AK035 | No binding detected | 110 | nM | N/A |

[0713] Cleavage

[0714] The cleavage rate of the masked IL-2 polypeptide constructs is assessed by conducting receptor-binding assays, as described above, after incubation of the masked IL-2 peptide constructs in the presence or absence of a protease, and with the protease, if any, inactivated at various time points, such as by the addition of EDTA. The cleavage rate is also assessed using reducing and non-reducing poly acrylamide gel electrophoresis (PAGE) and by mass spectrometry whole mass and peptide snap analyses. The cleavage rate is also assessed using an ex vivo assay in which the masked IL-2 polypeptide constructs are exposed to human, mouse, or cynomolgus monkey peripheral blood lymphocytes, or normal human tissue or human tumor tissue.

[0715] For some protease activation studies, MMP10 was diluted to 50 ng/uL in MMP cleavage buffer and activated with 1 mM APMA for 2 h at 37° C. 5 uL of protease (250 ng total) of the activated protease was incubated with 1 uM of masked cytokine constructs (e.g., masked IL-2 polypeptide constructs) and incubated at 37 degrees for 2 hours. Cleavage was assessed by SDS-PAGE using AnykD™ Criterion™ TGX Stain-Free™ Protein Gels. A similar approach is taken to test cleavage by other proteases.

[0716] FIG. 7A depicts an exemplary structure of a masked IL-2 polypeptide prior to (left) and after (right) cleavage by a protease, such as a protease associated with the tumor environment. FIG. 7B depicts SDS-PAGE analysis of an exemplary masked IL-2 polypeptide construct that was incubated in the absence (left lane) or presence (right lane) of the MMP10 protease.

[0717] Proliferation

[0718] Proliferation of IL-2 responsive tissue culture cell lines, such as CTLL2, YT, TF1B, LGL, HH, and CT6, following treatment with the masked IL-2 polypeptide constructs generated in Example 1 is assessed. For experiments involving the masked IL-2 polypeptide constructs, cells arc plated in 96 well tissue culture plates in media lacking IL-2 for 2-4 hours and then treated with the masked IL-2 polypeptide constructs at various concentrations. After incubation at 37 degrees for 24-48 hours, the cell number is determined by the addition of MTS, alamar blue, luciferase, or a similar metabolic detection reagent, and the colorimetric, fluorescent or luciferase readout detected by a plate spectrophotometer reader.

[0719] The proliferation of immune cells following treatment with the masked IL-2 polypeptide constructs generated in Example 1 is also assessed. Human, mouse, or cynomolgus peripheral blood mononuclear cells (PBMCs) are treated with the constructs at various concentrations, and the proliferation of cell types, such as Natural Killer (NK) cells, CD8+ T cells, CD4+ T cells, anchor Treg cells, is determined by staining for the particular cell type and analysis via fluorescence activated cell sorting (FACS). In some experiments, some PBMCs are treated with controls for comparison. In some experiments, some PBMCs are treated with aldesleukin as a control for the masked IL-2 polypeptide treatment. in some experiments, the masked IL-2 poly peptide constructs are tested in conditions with and without protease cleavage (e.g., activation). In some experiments, the NK cells are stained as CD45+ CD3− CD56+, the CD8+ T cells are stained as CD45+ CD3+ CD8+, the CD4+ T cells are stained as CD45+ CD3+ CD4+ CD25−, and the Treg cells are stained as CD45+ CD3+ CD4+ CD25+ FOXP3+. In some experiments, the PBMCs are treated for a period of live days. In some experiments, the PBMCs are also stained with Ki67, a marker of cell proliferation. In some experiments, the PBMCs are labeled with CFSE (Sigma-Aldrich) prior to treatment and proliferation is measured by determining the extent of CFSE dilution. In some experiments, each construct, as well as aldesleukin and/or other controls, is administered at one or more concentrations, such as one or more concentrations ranging from 0.0001 nM to 500 nM.

[0720] STAT5 Activation

[0721] The activation of Signal Transducer and Activator of Transcription 5 (STAT5) following treatment with the masked IL-2 polypeptide constructs generated in Example 1 is also assessed. PBMCs are treated with the constructs for a specified period of time and are then immediately fixed to preserve the phosphorylation status of proteins, such as STATS. In some experiments, some PBMCs are treated with controls for comparison. In some experiments, some PBMCs are treated with aldesleukin as a control for the masked IL-2 polypeptide treatment. In some experiments, the masked IL-2 polypeptide constructs are tested in conditions with and without protease cleavage (e.g., activation). In some experiments, the PBMCs are treated for 10 minutes, 15 minutes, 20 minutes, or 25 minutes. In some experiments, each construct, as well as aldesleukin and/or other controls, is administered at one or more concentrations, such as one or more concentrations ranging from 0.0001 nM to 500 nM. In some experiments, the fixed and permeabilized PBMCs are then stained with an antibody specific for phosphorylated STAT. (phospho-STAT5) and are analyzed by flow cytometry. In some experiments, total and phosphorylated levels of STAT5 are measured. The phospho-STAT5 status of certain cell types, such as NK cells, CD8+ T cells, CD4+ T cells, and/or Treg cells, is determined by staining for the particular cell type. In some experiments, the NK cells are stained as CD45+ CD3− CD56+, the CD8+ T cells are stained as CD45+ CD3+ CD8+, the CD4+ T cells are stained as CD45+ CD3+ CD4+ CD25−, and the Treg cells are stained as CD45+ CD3+ CD4+ CD25+ FOXP3+.

[0722] The activation of STAT5 in the mouse cell lines, such as CTLL-2 cells, following treatment with the masked IL-2 polypeptide constructs generated in Example 1 is also assessed. In some experiments, some CTLL-2 cells are treated with controls for comparison. In some experiments, some CTLL-2 cells are treated with aldesleukin as a control for the masked IL-2 polypeptide treatment. In some experiments, the masked IL-2 polypeptide constructs are tested in conditions with and without protease cleavage (e.g., activation). In some experiments, the CTLL-2 cells are treated for 10 minutes, 15 minutes, 20 minutes, or 25 minutes, and are then fixed to preserve the phosphorylation status of proteins, such as STAT5. In some experiments, each construct, as well as aldesleukin and/or other controls, is administered at one or more concentrations. In some experiments, total and phosphotylated levels of STATS are measured. In some studies, the levels of intracellular STAT5 activation (pSTAT5 signal) induced by IL-2 was determined by the following method. Frozen human PBMCs were thawed in water bath and added to 39 mL pre-warmed media (RPMI1640 medium plus 10% FBS, 1%P/S, 1% NEA), spun and reconstitute in media at 10E6 cells/mL. Cells were plated at 5E5 per well cells in a 96 well plate. IL-2 (e.g., rhIL-2 or an exemplary IL-2-containing polypeptide construct) diluted in medium was added to each well, and incubated at 37° C. for 20 min. Cells were then fix with 200 ul Fixation buffer (eBiosciences) at 4° C., overnight. After centrifugation, the fixed cells were resuspended in 200 ul cold BD Phosflow buffer and incubated at 4° C. for 30 min. After washing the cells twice, they were treated with Biolegend Human TruStain FcX (2.5 uL in 50 uL total per sample in Staining buffer) for 5 min on ice. Staining antibodies were added; 5 ul pSTAT5-APC (pY694, BD), 10 ul CD56-BV421 (5.1H11, Biolegend), 10 ul CD4− PerCP/Cy5.5 (A.161A1, Biolegend), and 10 ul CD3-FITC (UCHT1, Biolegend) and incubated for 30 min, on ice, protected from light. Cells were washed 2 times and resuspended, and analyzed by flow cytometry.

[0723] FIGS. 8A-8D depict the results from STAT5 activation studies, as described above, using the exemplary constructs AK032, AK035, AK041, or rhIL-2 as a control. The levels of STAT5 activation (%) are shown for NK cells, CD8+ T cells, effector T cells (Teff), and regulatory T cells (Treg). The AK032 and AK035 constructs include an IL-2 polypeptide linked to an Fc domain, and the AK041 construct includes an IL-2 polypeptide linked to a CD25 domain and a CD122 domain. As shown, engineered IL-2 polypeptide constructs can, in some embodiments, reduce activation of Treg cells while retaining or enhancing activation of CD8+ T cells and NK cells.

[0724] FIGS. 9A-9C depict the results from STAT5 activation studies, as described above, using the exemplary constructs AK081 and AK032. The AK081 construct with and without prior exposure to MMP10 was tested. An isotype control as well as a no IL-2 negative control was also tested. The levels of STAT5 activation (%) are shown for NK cells, CD8+ T cells, and CD4+ T cells. The AK032 and AK081 constructs include an IL-2 polypeptide linked to an Fc domain, and the AK081 construct includes a cleavable peptide in the linker connecting the IL-2 polypeptide to the Fc domain. As shown, the non-masked monomeric AK081 IL-2 polypeptide construct stimulates STAT5 activation of PBMCs with or without protease activation similarly to the iron-masked dimeric AK032 IL-2 polypeptide construct. FIGS. 10A-10D depict the results from STAT5 activation studies, as described above, using the exemplary constructs AK081 and AK111, as well as controls that included an rhIL-2 and anti-RSV antibody. A no-treatment control was also tested. The AK111 construct is an exemplary masked IL-2 polypeptide construct that includes a wildtype form of an IL-2 polypeptide (except for a C125A mutation). As shown in FIGS. 10A-10D, the masked IL-2 polypeptide construct AK111 demonstrated reduced STAT5 activation as compared to the non-masked IL-2 polypeptide construct AK081. FIG. 10D provides EC50 (pM) and fold-change data for the AK081, AK111 constructs, as well as the rhIL-2 control.

[0725] FIGS. 11A-11D depict the results from STAT5 activation studies, as described above, using the exemplary constructs AK167 and AK168, as well as controls that included an rhIL-2 and anti-RSV antibody. A no-treatment control was also tested. The AK168 construct is an exemplary masked IL-2 polypeptide construct that includes a mutant form of an IL-2 polypeptide that eliminates or reduces CD25 binding. The AK167 construct is a parental, non-masked form of the AK168 construct that includes the same mutant IL-2 polypeptide, As shown in FIGS. 11A-11C, the non-masked AK167 construct demonstrated reduced STATS activation as compared to the rhIL-2 control, and the masked IL-2 polypeptide construct AK168 did not induce detectable STATS activation. FIG. 11D provides EC50 (pM) and fold-change data for the AK167, AK168 constructs, as well as the rhIL-2 control. The EC50 of the AK168 construct was non-detectable (n.d.).

[0726] FIGS. 12A-12D depict the results from STAT5 activation studies, as described above, using the exemplary constructs AK165 and AK166, as well as an isotype control and an IL-2-Fc control, that were (+MMP10) or were not previously exposed to the MMP10 protease. The AK166 construct is an exemplary masked IL-2 polypeptide construct that includes a wildtype form of an IL-2 polypeptide (except for a C125A mutation). The AK165 construct is a parental, non-masked form of the AK166 construct that includes the same IL-2 polypeptide. The key as shown in FIG. 12A also applies to FIG. 12B, and the key as shown in FIG. 12C also applies to FIG. 12D. As shown in FIGS. 12A-12D STAT5 activation was greatly diminished for the masked AK166 construct (without protease cleavage), but was restored to levels resembling the IL2-Fc control following exposure to the activating protease MMP10. FIGS. 13A-13C depict the results from STAT5 activation studies, as described above, using the exemplary constructs AK109 and AK110, as well as an isotype control and an IL-2-Fc control, that were (4-MMP10) or were not previously exposed to the MMP10 protease. The AK109 and AK110 construct are exemplary masked IL-2 polypeptide constructs that include half-life extension domains having different heterodimenzation mutations. The key as shown in FIG. 13B also applies to FIG. 13A. As shown in FIGS. 13A-13C, STAT5 activation was greatly diminished for the masked AK109 and AK110 construct (without protease cleavage), but was greatly increased to levels approaching the IL2-Fc control following exposure to the activating protease MMP10.

[0727] FIGS. 14A-14D depict the results from STAT5 activation studies, as described above, using the constructs AK211, AK235, AK253, AK306, AK310, AK314, and AK316, as well as an an rhIL-2 control. This includes constructs that are parental, non-masked constructs (AK235, AK253, AK306, AK310, AK314) that include various mutations that modulate CD25 binding. FIG. 14D provides EC50 data for each of the tested constructs as well as the rhIL-2 control.

[0728] FIGS. 15A-15D depict the results from STAT5 activation studies, as described above, using the constructs AK081, AK167, AK216, AK218, AK219, AK220, and AK223 that have been activated by protease, as well as an an rhIL-2 control. A no-treatment control was also tested. This includes masked IL-2 polypeptide constructs (AK216, AK218, AK219, AK220, and AK223) that include various mutations that modulate CD25 binding. The constructs were previously exposed to an activating protease prior to testing their ability to activate STATS. FIG. 15D provides EC50 data for each of the tested constructs as well as the rhIL-2 control.

[0729] FIGS. 16A-16C depict the results from STAT5 activation studies, as described above, using the constructs AK081, AK189, AK190, and AK210, as well as art an anti-RSV control. This includes masked IL-2 polypeptide constructs (AK189, AK190, AK210) that include an IL-2 polypeptide having a C125A mutation and include the same cleavable peptide sequence (RAAAVKSP) but having different linker sequences due to differences in the amino acid residues on the N-terminus of the protease cleavage sequence. The key as shown in FIG. 16A also applies to FIGS. 16B and 16C.

[0730] FIGS. 17A-17C depict the results front STAT5 activation studies, as described above, using the constructs AK167, AK191, AK192, and AK193, as well as an an anti-RSV control. This includes masked IL-2 polypeptide constructs (AK189, AK190, AK210) that include an IL-2 polypeptide having R38A, F42A, Y45A, E62A, and C125A mutations and include the same cleavable peptide sequence (RAAAVKSP; SEQ ID NO: 27) but having different linker sequences due to differences in the amino acid residues on the N-terminus of the protease cleavage sequence. The key as shown in FIG. 17A also applies to FIGS. 17B and 17C.

### Example 3

### In Vivo Characterization of Masked IL-2

[0731] Pharmacokinetics

[0732] The pharmacokinetics of the masked IL-2 polypeptide constructs and generated in Example 1 assessed in vivo using mouse models.

[0733] Mice are treated intravenously or subcutaneously with the constructs and the concentration of the construct in the plasma is measured over time. In some experiments, some mice me treated with controls for comparison. In some experiments, some mice are treated with aldesleukin as a control for masked IL-2 polypeptide treatment. In some experiments, the mice that are treated have tumors. In some experiments, the mice that are treated are tumor-free. In some experiments, mice are treated with the constructs and blood is drawn at various times over the course of treatment, which may include drawing blood prior to the initiation of treatment and processing it to obtain plasma. In some experiments, blood is drawn at various time points over the course of two weeks, three weeks, or four weeks or more of treatment. In some experiments, the mean plasma concentration of the administered constructs, as well as aldesleukin and/or other controls, is measured. Masked IL-2 polypeptide constructs are detected in the plasma samples after dilution into PBS Tween with IL-2- and human Fc-specific ELISAs and are quantified using a standard curve generated for each construct. The percentage of full length and cleaved constructs is determined by western blot with anti-huFc-HRP and anti-huIL-2-HRP and by whole mass and peptide mass spectrometry.

[0734] The pharmacokinetics of the masked IL-2 polypeptide constructs in tumors is also assessed in vivo using mouse models. Mice having tumors are treated intravenously or subcutaneously with the constructs and the concentration of the construct in tumors of the mice is assessed. In some experiments, some mice are treated with controls for comparison. In some experiments, some mice are treated with aldesleukin as a control for masked IL-2 polypeptide treatment. Tumors are analyzed for the presence of the constructs as well as the presence of particular proteases. In some experiments, the tumors are analyzed for the presence and percentage of full length and cleaved constructs.

[0735] Some pharmacokinetic studies were carried out according to the following method. C57BL/6 female mice were purchased from Charles River Laboratories and were 8-10 weeks old at the start of study. MC38 tumor cells (5×10⁵ cells per mouse) were injected subcutaneously into the right flank of each mouse. Upon reaching ˜100 mm³ sized tumors (day 0), the mice received a single 2 mg/kg intravenous dose of the construct of interest (e.g., a non-masked parental IL-2 polypeptide construct, a masked IL-2 polypeptide construct, or a non-cleavable masked IL-2 polypeptide construct) in PBS. Constructs tested include, for instance, AK032, AK081, AK111, AK167, AK168, AK191, AK197, AK203, AK209, and AK211. Plasma were collected at 5 min, days 1, 2 and 5 after dosing. Drug levels were determined using ELISAs utilizing anti-human IgG (clone M 1310G05, Biolegend) as the capture antibody and various detection antibodies. HRP or biotin conjugated. detection antibodies against human IgG (ab97225, Abeam) or CD122 (clone 9A2, Ancell) and IL-2 (Poly5176, Biolegend) were utilized to detect total and non-cleaved drug levels, respectively.

[0736] FIGS. 18A-18D describe results from pharmacokinetic studies carried out, as described above, in tumor-bearing mice using the constructs AK032, AK081, AK111, AK167, and AK168, as well as an anti-RSV control. FIG. 18A provides a simplistic depiction of the structure of each of the constucts tested. As indicated, AK111 and AK168 are exemplary masked IL-2 polypeptide constructs. The AK167 and AK168 constructs include mutations (R38A, F42A,Y45A, and E62A) that eliminate or reduce binding to CD25. FIG. 18A shows Fc levels in plasma (μg/mL) by detecting human IgG, FIG. 18C shows Fc-CD122 levels in plasma (μg/mL) by detecting human CD122, and FIG. 18D shows Fc-IL2 levels in plasma (μg/mL) by detecting human IL-2.

[0737] FIGS. 19A-19D describe results from pharmacokinetic studies carried out, as described above, in tumor-bearing mice using the constructs AK167, AK 191 AK197, AK203, AK209, and AK211, as well as an anti-RSV control. FIG. 19A provides a simplistic depiction of the structure of each of the constructs tested. As indicated, AK168, AK191, AK197, AK203, and AK209 are exemplary masked IL-2 polypeptide constructs that each include a different cleavable peptide sequence in the linker connecting the IL-2 polypeptide to the half-life extension domain. FIG. 19B shows Fc levels in plasma (μg/mL) by detecting human IgG, FIG. 19C shows Fc-IL2 levels in plasma (ug/mL) by detecting human IL-2, and FIG. 19D shows Fc-CD122 levels in plasma (μg/mL) by detecting human CD122. As shown in FIGS. 19B, 19C and 19D, the Fc levels, Fc-IL2 levels, and Fc-CD122 levels in the plasma are similar among the masked IL-2 polypeptide constructs tested.

[0738] Bioactivity in Mice

[0739] The in vivo bioactivity of the masked IL-2 polypeptide constructs generated in Example 1 is assessed in vivo using mouse models, such as C579L/6 mice. Mice are treated with the constructs and in vivo bioactivity is assessed, In some experiments, some mice are treated with controls for comparison. In some experiments, some mice are treated with aldesleukin as a control for masked IL-2 polypeptide treatment. In some experiments, the mice that are treated have tumors. In some experiments, the mice that are treated are tumor-free. In some experiments, the dose-dependent expansion of immune cells is assessed in the mice. In some experiments, the mice are treated with various doses of a construct, aldesleukin, or other control. In some experiments, the mice are treated over the course of two weeks. Blood is collected from the mice at various time points and is then stained using antibodies to immune cell markers of interest. In some experiments, the longitudinal kinetics of the proliferation and expansion of certain circulating cell types, such as CD8+ NK cells and Treg cells, is also determined, as well as the ratio of CD8+ cells and NK cells to CD4+ CD25+ FoxP3+ Treg cells. In some experiments, the mice are assessed for vascular leakage, such as by assessing for edema and lymphocyte infiltration in certain organs like the lung and liver as determined by organ wet weight and histology.

[0740] In some studies, vascular leakage was assessed in order to assess potential toxicity-related effects mediated by IL-2 based therapies by performing the following method. Repeated dose toxicity studies were conducted using C57BL/6 female mice that were purchased from Charles River Laboratories and were 8-10 weeks old weighing 18-22 grams at the staid of study. Groups of 5 mice received daily intraperitoneal injections of masked and non-masked IL-2 constructs in PBS daily for 4 or 5 days. The constructs tested included AK081, AK111, AK167, and AK168. A control antibody was also administered as a control. Two hours after the last dose, all mice received an intravenous injection of 0.1 ml of 1% Evans blue (Sigma, calf E2129) in PBS. Two hours after Evans blue administration, mice were anesthetized and perfused with 10 U/ml heparin in PBS. Spleen, lung and liver were harvested and fixed in 3 ml of 4% PEA 2 days at 4° C. prior to measuring the absorbance of the supernatant at 650 nm with NanoDrop OneC (Thermo Fisher Scientific, Waltham, Mass.) as an indicator of vascular leak of Evans blue. Fixed organs were embedded in paraffin, sectioned, and stained with hematoxylin and eosin. Histopathological studies and quantification were carried out by NovoVita Histopath Laboratory, LLC. (Allston, Mass.) according to standard procedures. FIGS. 25A-50D depict results from an in vivo study as described above for assessing vascular leakage using the exemplary masked IL-2 polypeptide constructs AK111 and AK168, as well as the non-masked polypeptide constructs AK081 and AK167, and an anti-RSV control. FIG. 25A shows the percentage (%) of body weight loss, and FIGS. 25B, 25C and 25D shows the weight in grams of the liver, lung, and spleen, respectively, for each.

[0741] Vascular leakage as indicated by measuring the extent of dye leakage into tissues was also assessed for the AK081, AK111, AK167, and AK168 constructs, along with an anti-RSV control, with results shown in FIGS. 26A and 26B for the liver and lung, respectively. The extent of dye leakage was measured based on absorbance at 650 nm.

[0742] Vascular leakage as indicated by measuring the extent of mononuclear cell perivascular invasion into the liver and lung was also assessed for the AK081, AK111, AK167, and AK168 constructs, along with an anti-RSV control, with results shown in FIGS. 27A and 27B for the liver and lung, respectively. The average number of mononuclear cells in the liver (FIG. 27A) and the average number of mononuclear cells in the lung (FIG. 27B) depicted for each. As shown in FIG. 27B, for instance, the masked IL-2 polypeptide constructs AK111 and AK168 did not result in a detectable number of mononuclear cells in the lung, unlike the non-masked constructs AK081 and AK167.

[0743] Infiltrating Immune Cell Phenotype

[0744] The phenotype of immune cells infiltrating tumors in vivo in mouse models treated the masked IL-2 polypeptide constructs generated in Example 1 is assessed. Mice are treated with the constructs and the phenotype of tumor-infiltrating immune cells is assessed. In some experiments, some mice are treated with controls for comparison. In some experiments, some mice are treated with aldesleukin as a control for masked IL-2 polypeptide treatment. Mice bearing tumors are treated with a construct, aldesleukin, or another control, and tumors, tissues such as liver, lung, and spleen, and blood, are collected at various time points following the initial dose, such as five days, seven days, or ten days after the initial dose. In some experiments, immune cells are isolated from the tumors, tissues, and blood, and are subject to phenotypic assessment using flow cytometry. In some experiments, the isolated immune cells are assessed using markers of interest, such as those for CD8+ T cells, Memory CD8+ T cells, activated NK cells, CD4+ T cells, and CD4+ Treg cells.

[0745] In some studies, the phenotype of immune cells infiltrating tumors in vivo was assessed using the following method. C57BL/6 female mice were purchased from Charles River Laboratories and were 8-10 weeks old at the start of study. MC38 tumor cells (5×10⁵ cells per mouse) were injected subcutaneously into the right flank of each mouse. Upon reaching ˜100 mm³ sized tumors (day 0), the mice received a single 2 mg/kg intravenous dose of the construct of interest (e.g., a non-masked parental IL-2 polypeptide construct, a masked IL-2 polypeptide construct, or a non-cleavable masked IL-2 polypeptide construct) in PBS. On day 5, mice were euthanized by CO2 asphyxiation and tumors, livers, spleens and blood were harvested. Cell suspensions were prepared from spleens by mechanical disruption and and passing through a 40 μm cell strainer. The tumor tissues were enzymatically digested using Miltenyi Tumor Dissociation Kit reagents (Miltenyi cat #130-096-730) and the gentleMACS Dissociator (Miltenyi) was used for the mechanical dissociation steps. Red blood cells in the spleen and tumor cell suspensions and blood were lysed using ACK buffer (Gibco cat #A10492). The cell suspensions were stained with the following antibodies: CD45 (clone 30-F11, eBioscience), CD3 (clone 2C11, Biolegend), CD8 (clone 53-6.7, BD Biosciences), CD4 (clone RM-45, BD Biosciences), FOXP3 (MF-14, Biolegend), CD25 (3C7, Biolegend), CD44 (clone IM7, eBioscience), and NKp46 (29A1.4, eBioscience). Data acquisition was carried out on the MACSQuant Analyzer flow cytometer (Milenyi) and data were analyzed using the FlowJo.

[0746] Results from studies testing the in vivo responses of CD4, CD8, NK, and Treg percentages in spleen, blood, and tumor, as carried out as described above, using the AK032, AK081, AK 111, AK167, and AK168 constructs, as well as an anti-RSV IgG control, are shown in FIGS. 20A-20L. AK111 and AK168 are exemplary masked IL-2 polypeptide constructs.

[0747] Results from studies testing the in vivo responses of CD4, CD8, NK, and Treg percentages in spleen, blood, and tumor, as carried out as described above, using the AK167, AK168, AK191, AK197, AK203, AK209, and AK211 constructs, as well as an anti-RSV IgG control, are shown in FIGS. 21A-21L. AK168, AK191, AK 197, AK203, and AK209 are exemplary masked IL-2 polypeptide constructs that each include a different cleavable peptide sequence in the linker connecting the IL-2 polypeptide to the half-life extension domain. Statistical analysis was performed using One-way ANOVA as compared to the non-cleavable AK211 construct.

[0748] Results from studies testing the in vivo responses of CD4, NK, and Treg percentages in spleen, blood, and tumor, as carried out as described above, using the AK235, AK191, AK192, AK193, AK210, AK189, AK190, and AK211 constructs are shown in FIGS. 22A-22L. AK191, AK192, AK193, AK210, AK189, and AK190 are exemplary masked Th-2 polypeptide constructs that each include a cleavable peptide sequence in the linker connecting the IL-2 polypeptide to the half-life extension domain. The linker sequence also differs among these constructs, depending on the linker sequence utilized. AK189, AK190, and AK210 include an IL-2 polypeptide having a C125A mutation, and AK191, AK192, and AK193 include an IL-2 polypeptide having C125A, R38A, F42A, Y45A, and E62A mutations. The AK235 construct is a non-masked construct and the AK211 construct includes a non-cleavable linker sequence. Statistical analysis was performed using One-way ANOVA as compared to the non-cleavable AK211 construct.

[0749] Results from studies testing the in vivo T cell activation in spleen, blood, and tumor, as carried out as described above, using the AK235, AK191, AK192, AK193, AK210, AK189, AK190, and AK211 constructs, as described above, are shown in FIGS. 23A-23I. I cell activation was measured as the mean fluorescence intensity (MEI) of CD25 in CD8+ T cells, CD4+ T cells, or Foxp3+ cells in the spleen, blood, and tumor. Statistical analysis was performed using One-way ANOVA as compared to the non-cleavable AK211 construct.

[0750] In Vivo Cleavage

[0751] The in vivo cleavage of masked IL-2 cytokine constructs (e.g., masked IL-2 polypeptide constructs) is assessed. In some studies, a control antibody is administered for comparison. In some studies, in vivo cleavage is assessed by administering the construct of interest in a mouse and, after a certain period of time, capturing human IgG and then measuring the levels of, e.g., human IgG, CD122, and IL-2.

[0752] In some studies testing the in vivo cleavage of masked IL-2 polypeptide constructs, drug levels (i.e., levels of the administered construct, including cleavage byproducts) were determined using ELISAs utilizing anti-human IgG (clone M1310G05, Biolegend) as the capture antibody and various detection antibodies. 1-1RIP or biotin conjugated detection antibodies against human IgG (ab97225, Abeam) or CD122 (clone 9A2, Ancell) and IL-2 (Poly 5176, Biolegend) were utilized to detect total and non-cleaved drug levels, respectively. The concentrations of cleaved and released IL-2 is calculated by subtracting non-cleaved (i.e., intact) front total drug concentrations. FIGS. 24A-24D depict the results front studies testing the in vivo cleavage of the exemplary masked IL-2 polypeptide constructs AK168 (cleavable peptide sequence: MPYDLYHP) and AK209 (cleavable peptide sequence: VPLSLY; SEQ ID NO: 15). The AK167 construct is a cleavable non-masked IL-2 poly peptide construct that includes the same IL-2 polypeptide as the masked AK168 construct. As shown in FIGS. 24A-24D, both the masked (AK168 and AK209) and non-masked (AK167) constructs were effectively cleaved, and both cleavable peptide sequences were cleaved. FIG. 24E depicts results from a pharmacokinetic study of total plasma IgG concentration (μg/mL) for total levels of the AK167, AK168, and AK209 constructs, and for levels of non-cleaved forms of each construct.

[0753] Tumor Eradication and Inhibition of Metastasis

[0754] The ability of the masked IL-2 polypeptide constructs generated in Example 1 to promote tumor eradication and to inhibit metastasis is assessed in vivo using mouse models, such as syngeneic MC38, CT26, and B161F10 tumor models.

[0755] Mice are implanted with tumor cells subcutaneously, and tumors are allowed to grow to a palpable size. Tumor-bearing mice are treated with the masked IL-2 constructs and tumor volume is measured over the course of treatment. In some experiments, some mice are treated with controls for comparison. In some experiments, some mice are treated with aldesleukin as a control for masked polypeptide treatment. Tumor volume is measured periodically over the course of treatment. In some experiments, body weight is also measured periodically over the course of treatment. In some experiments, plasma samples are produced over the course of the treatment and analyzed for pharmacokinetics, pharmacodyminics, cleavage, and blood markers, such as those for CD8+ T cells, Memory CD8+ T cells, activated NK cells, CD4+ cells, and CD4+ Treg cells.

[0756] The capability of the masked IL-2 polypeptide constructs to inhibit metastasis is also assessed in vivo using mouse models suitable for metastasis studies, such as syngeneic CT26 tumor models for assessing lung metastasis. Mice are implanted with tumor cells subcutaneously. In some experiments, tumors are allowed to grow to a palpable size prior to treatment. In some experiments, treatment begins before tumors grow to palpable size. Tumor-bearing mice are treated with the masked IL-2 constructs are assessed for tumor cell metastasis into tissues such as lungs, liver, and lymph nodes.

[0757] In some studies, a syngeneic tumor model was used to assess the ability of masked IL-2 polypeptide constructs to reduce tumor volume in accordance with the following method. C57BL/6 female mice were purchased from Charles River Laboratories and were 8-10 weeks old at the start of study. MC38 tumor cells (5×105 cells per mouse) were injected subcutaneously into the right flank of each mouse. Upon reaching ˜125 mm3 sized tumors (day 0), the mice were randomized to receive 2 mg/kg doses of AK081, AK 111, AK167, or AK168, or an anti-RSV antibody as a control, in PBS. Mice were dosed intraperitoneally, three times a week for 6 doses. Tumor volume was calculated (Length*(Width\hat{ }2)/2) using dial calipers and body weights were recorded twice weekly. FIGS. 28A and 28B show results from a syngeneic tumor model study that assessed tumor volume and body weight over the course of treatment.

[0758] As shown in FIG. 28A, treatment using exemplary IL-2 polypeptide constructs, including the masked constructs AK111 and AK168, resulted in tumor growth inhibition over time as compared to the anti-RSV control. As shown in FIG. 28B, there was a general lack of body weight reduction observed when the mice were treated with the masked constructs AK111 and AK168.

[0759] Bioactivity in Cynomolgus Monkeys

[0760] The in vivo bioactivity of the masked IL-2 poly peptide constructs a generated in Example 1 is assessed in vivo in cynomolgus monkeys. Cynomolgus monkeys are treated with the constructs and in vivo bioactivity, pharmacokinetics, and cleavage is assessed. In some experiments, some monkeys are treated with controls for comparison. In some experiments, some monkeys are treated with aldesleukin as a control for masked IL-2 polypeptide treatment. In some experiments, the monkeys are treated with various doses of the construct, aldesluekin, or other control. Blood is collected from the monkeys at various time points and is then evaluated for certain cell types, such as CD8+ T cells, Memory CD8+ T cells, activated NK cells, CD4+ T cells, and CD4++Treg cells, and or markers of interest, such as for the dose-response of total lymphocytes, Ki67+, and of soluble CD25. In some experiments, the longitudinal kinetics of the proliferation and expansion of certain circulating T and NK cell types is assessed. In some experiments, pharmacokinetics and cleavage of the masked IL-2 polypeptide constructs are determined by ELISA, PAGE, and mass spectrometry.

[0761] To test the safety profile of exemplary masked IL-2 polypeptide constructs in non-human primates, a dose ranging study is performed in accordance with the following method. Groups of 3 healthy male cynomolgus monkeys (Macaca fascicularis) are randomly assigned to receive a single intravenous bolus dose of 2 mL/kg of activatable (i.e., cleavable) masked IL-2 polypeptide proteins or non-cleavable masked IL-2 polypeptide proteins at 10, 30 and 100 nmol/kg in 100 mM sodium citrate buffer (pH 5.5). A third group receives the parental non-masked, cleavable protein at 3, 10 and 30 nmol/kg as a positive control. This third group is dosed at a lower range to account for higher potency of the parental non-masked molecules. Doses are calculated in moles to account for differences in molecular weight. Blood samples are collected before dosing and 1, 24, 48, 72, 96, 168, 264 and 336 hours post-dosing. An automated hematology analyzer is used to monitor changes in lymphocyte subsets and serum chemistry. Total and intact non-cleaved) drug levels are measured from plasma using custom ELISA as described above. Soluble CD25 levels are measured with an ELISA (R&D systems, cat #DR2A00) to monitor immune stimulation. Plasma levels of inflammatory cytokines are quantified using custom multiplexed electrochenaluminescence assay (Meso Scale Discovery). Blood pressure is monitored as an indicator of vascular leak syndrome. PK is analyzed using an ELISA that captures IL-2 and detects human Fc and by an ELISA that captures human Fc and detects human Fc.

### Example 4

[0762] C57BL/6 female mice were purchased from Charles River Laboratories and were 8-10 weeks old at the start of study. MC38 tumor cells (5×10⁵ cells per mouse) were injected subcutaneously into the right flank of each mouse. Upon reaching ˜100 mm³ sized tumors (day 0), the mice received a single high dose intraperitoneal dose of various Fc-IL-2 constructs in PBS. Plasma were collected at 5 min, days 3, 5 and 7 after dosing.

[0763] The constructs used are:

[0764] Immunophenotyping was performed using a FACS-based method. On day 5, mice were euthanized by CO2 asphyxiation and tumors, livers, spleens and blood were harvested. Cell suspensions were prepared from spleens by mechanical disruption and and passing through a 40 μm cell strainer. The tumor tissues were enzymatically digested using Miltenyi Tumor Dissociation Kit reagents (Miltenyi cat #130-096-730) and the gentleMACS Dissociator (Miltenyi) was used for the mechanical dissociation steps. Red blood cells in the spleen and tumor cell suspensions and blood were lysed using ACK buffer (Gibco cat #A10492).

[0765] The cell suspensions were stained with the following antibodies: CD45 (clone 30-F11, ethoscience), CD3 (clone 2C11, Biolegend), CD8 (clone 53-6.7, RD Biosciences), CD4 (clone RM-45, BD Biosciences). Data acquisition was carried out on the MACSQuant Analyzer flow cytometer (Milenyi) and data were analyzed using the FlowJo.

[0766] Drug levels were determined using ELISAs utilizing anti-human IgG (clone M1310G05, Biolegend) as the capture antibody and various detection antibodies. HRP or biotin conjugated detection antibodies against human IgG (ab97225, Abeam) or CD122 (clone 9A2, Ancell) and IL-2 (Poly5176, Biolegend) were utilized to detect total and non-cleaved drug levels, respectively.

[0767] AK471 with 1253A FcRn mutation induced robust CD8 T cells expansion in the TME while remaining inactive in the periphery as shown in FIGS. 29A and 29B.

[0768] AK471 has slightly shorter half-life compared to aglyco-hIgG1 as shown in FIGS. 30A, B and C.

[0769] There is no evidence of cleavage or decapitation with AK471 in the plasma (FIGS. 31A, B and C).

### Example 5

### IL-12 Heteroalkusion

[0770] Cleavage and Binding to Recombinant IL-12Receptors, IL-12Rb1 and IL-12Rb2 by SPR:

[0771] Sensor Chips were coated and immobilized with IL-12 receptors. Dilutions of IL-12 constructs were flowed over the chips with the immobilized IL-12 receptors to determine the on rate at 25 degrees C. At equilibrium (approximately 3-4 minutes), the flow buffer was changed to PBST, to determine the off rates over 6 minutes. Between each run the chip was regenerated. The tables represent the SPR data (FIGS. 34 and 35). ND is for “not determined” as the masking of the IL-12 prevented binding to the receptors; therefore, binding numbers were not able to be determined.

[0772] Testing IL-12 Molecules with HEK-Blue IL-12 Cells:

[0773] HEK-Blue IL-12 reporter cells developed by Invivogen have been specifically designed to monitor the activation of the JAK-STAT pathway. These cells were generated by stable transfection of HEK293 cells with the human, IL-12Rβ1, and IL-12Rβ2 genes, along with the human JAK2 and STAT4 genes to obtain a fully functional IL-12 signaling pathway. In addition, a STAT4-inducible SEAP reporter gene was also introduced. Upon stimulation, HEK-Blue™ IL-12 cells trigger the activation of STAT4 and the subsequent secretion of SEAP. Tire levels of STAT4-induced SEAP can be readily monitored using QUANTI-Blue™. HEK-BlueIL-12 cells can be used to validate the functionality, toxicity, and variable dosage effects of human or murine IL-12. HEK Blue IL-12 cells were grown in passage media until ˜80% confluent. Washed single-cell suspension in assay media was plated and serial dilutions of IL-12 molecules in assay media were added to cells. Plate was incubated at 37° C. for 24 hours. After 24 h, Quanti-Blue solution (Invivogen) was prepared and cell supernatant was added to the Quanti-Blue solution and incubated for 1-2 h at 37° C. Absorbance at 625 nm measured. Data analysis was performed in Graphpad Prism, version 8.3. Background was subtracted from raw data and the data were fit nonlinearly: [Agonist] vs. response—Variable slope (four parameters), EC50 value of each IL-12 construct was reported.

### Example 6

[0774] This example investigates whether mutation GAG-binding domain on IL-12 constructs alter PK, two GAG-binding mutant variants (AK600 and AK601) was compared to WT IL-12 construct (AK598) in C57BL/6 non-tumor bearing mice. AK600 has a KDNTERV and AK601 has a KDNTEGRV GAG-binding domain mutants, respectively.

[0775] AK598, AK600 and AK601 all have tire following construct structure:

[0776] The animals were single dosed at either 1 or 10 mg/kg through i.v injection. Plasma drug levels were measured using human Fc capture (Southern Biotech IgG cat12049-01 Goat Anti-Human IgG, Monkey ads-UNLB) human Fc detect(ab97225) and/or human Fc capture/anti-human IL-12(ab83448) detect ELISA.

| | | | | | Actual | | |
|---|---|---|---|---|---|---|---|
| | Test | GAG | M.W. | Apprx. Dosing | Dosing | Actual Dosing | Batch |
| | Molecule | mutant | (kDa) | (mg/kg) | (nMoles/kg) | (mg/kg) | information |
| 1 | AK600 | KDNTERV | 143.8 | 10 | 69.5 | 10 | 02A |
| 2 | AK600 | KDNTERV | 143.8 | 1 | 6.95 | 1 | 02A |
| 3 | AK601 | KDNTEGRV | 143.9 | 10 | 69.5 | 10 | 01A |
| 4 | AK601 | KDNTEGRV | 143.9 | 1 | 6.95 | 1 | 01A |
| 5 | AK598 | WT | 144.3 | 10 | 69.5 | 10 | 02A |
| 6 | AK598 | WT | 144.3 | 1 | 6.95 | 1 | 02A |

[0777] It was found from ELISA that CAG-binding mutation from both AK600 and AK601 improves drug exposure in Cmax and AIX compared to AK598. No difference in PK profiles was observed between AK600 and AK601. Both AK600 and AK601 have similar half-life as AK598, which is about 2 days.

[0778] Results are shown in FIG. 36-40.

### Example 7

[0779] Free cysteine residues can cause intermolecular cross-linking and aggregation. This example tests whether amino acid mutations of Cysteine to Serine has an effect on aggregation and stability.

[0780] The following constructs were used in this example:

| Molecule | AK386 | AK604 | AK605 | AK606 |
|---|---|---|---|---|
| Cytokine | IL-12 | IL-12 | IL-12 | IL-12 |
| Scaffold | Clamp | Clamp | Clamp | Clamp |
| Mutation | WT | C242S | C252S | C242S/ |
| | | | | C252S |

[0781] Sequences for AK386, AK604 AK605 and AK606 are in the sequence table in Section 10.

[0782] Proteins were incubated with the indicated buffer at 40C for 3 days or 12 days. Then the molecules were analyzed by HPLC size exclusion chromatography and by SDS-PAGE and Coomassie staining.

[0783] At day 3, only enough aggregation was present to rank stability in 2 buffer conditions, where AK606 ranked the best. Trend towards being more stable with Cys→Ser mutations. At day 12, AK606 ranked the best in 6 additional buffer conditions. Cys→Set mutations appear to confer stability. SDS-PAGE shows Cys242 causes more covalent aggregation than Cys252. Day 0/12 shown, AK386 and AK605 show much more covalent aggregation than AK604 and AK606.

[0784] Results are shown in FIGS. 41-43.

### Example 8

[0785] This example demonstrates the masking and cleavage of exemplary L-12 constructs.

[0786] The following constructs were used in this example:

[0787] AK671 is an unmasked molecule, AK663 does not comprise a cytokine, and AK664 is non-cleavable. These three molecules serve as controls.

[0788] The cleavage peptide for each construct is show at the top of each column.

[0789] AK666, AK667, AK918, AK920 and AK669 are ‘version 1’ constructs, AK665, AK668, AK919, AK921, AK670 are ‘version 2’ constructs. AK924, AK922, AK925 and AK923 are ‘version 3’ constructs.

[0790] The cleavable linker (protease site linker), i.e. between the HL2 and the IL-12 domain, and the non-cleavable linker (b2 receptor linker) between HL1 and the masking moiety for each version is shown below:

| v1 | Protease site linker | | b2 receptor linker |
|---|---|---|---|
| V1 | GGSGGSXXXXXXSGP | V1 | PGGSGP |
| V2 | GGSGGSGGSXXXXXXSGP | V2 | GGSPG |
| | | V3 | GGSGGGSG |

[0791] Where applicable, all of these constructs comprise a KDNTEGRV mutation to the GAG binding domain of the IL-12p40 subunit, a C252S mutation of the IL-12p40 subunit, and a C242S mutation of the IL-12RB2 domain Exact sequences for each construct are shown in the sequence tables in Section 10.

[0792] i) Ex Vivo Cleavage Assay (WB/IL-12 Signalling)

[0793] 1 uM of IL-12 construct were incubated with 90 ul of conditioned media overnight or 90 ul of plasma, for the following times (d1-d2-d4-d7-d9-d11) at 37C. The cleavage rate is calculated as a ratio of: cleaved construct/(cleaved construct+intact construct), using a western blot anti-human IL-12 and anti-human IL-12Rb. The activation of these constructs by human tissue conditioned media is assessed using a post-IL-12 receptor signalling assay where 0.05×106 HEK-Blue cells are incubated with 37.5 nM of constructs, for 24 h.

[0794] Results are shown in FIG. 44 and in the tables below.

[0795] Molecules with the following cleavage sites exhibited readily detectable cleavage in the tumor supernatants:

RAAAVKSP
ISSGLLSGRS
MPYDLYHP

[0796] The cleavage sites sensitivity was observed in the following order:

[0797] RAAAVKSP>ISSGLLSGRS>MPYDLYHP

[0798] Therefore, the IL-12 constructs that harbor these cleavage sites represent good candidates for tumor selective activation in RCC and other types of cancers.

| Cutoff 1%, n = 30 | % Cleavage (WB) | | | | % Activity (signaling assay) | | | |
|---|---|---|---|---|---|---|---|---|
| | ISSGLLSGRS | | | | ISSGLLSGRS | | | |
| | AK669 | AK670 | AK922 | AK923 | AK669 | AK670 | AK922 | AK923 |
| # of samples with >1% Cleavage, activity | 2 | 5 | 2 | 2 | 3 | 9 | 1 | 8 |
| Frequency of cleavage, activation (%) | 6.7 | 16.7 | 6.7 | 6.7 | 10.0 | 30.0 | 3.3 | 26.7 |
| % Activation (Median) | 5.5 | 1.8 | 5.8 | 8.2 | 1.7 | 2.2 | 5.8 | 1.2 |
| | RAAAVKSP | | | | RAAAVKSP | | | |
| | AK920 | AK921 | AK924 | AK925 | AK920 | AK921 | AK924 | AK925 |
| # of samples with >1% Cleavage, activity | 7 | 4 | 3 | 3 | 7 | 5 | 6 | 7 |
| Frequency of cleavage, activation (%) | 23.3 | 13.3 | 10.0 | 10.0 | 23.3 | 16.7 | 20.0 | 23.3 |
| % Activation (Median) | 1.8 | 2.0 | 13.6 | 2.6 | 1.9 | 2.5 | 1.8 | 1.7 |
| | MPYDLYHP | | | | MPYDLYHP | | | |
| | AK667 | AK668 | | | AK667 | AK668 | | |
| # of samples with >1% Cleavage, activity | 2 | 2 | | | 5 | 8 | | |
| Frequency of cleavage, activation (%) | 6.7 | 6.7 | | | 16.7 | 26.7 | | |
| % Activation (Median) | 2.3 | 2.7 | | | 1.5 | 1.7 | | |
| | VPLSLYSG | | | | VPLSLYSG | | | |
| | AK665 | AK666 | | | AK665 | AK666 | | |
| # of samples with >1% Cleavage, activity | 7 | 1 | | | 7 | 4 | | |
| Frequency of cleavage, activation (%) | 23 | 3 | | | 23 | 13 | | |
| % Activation (Median) | 2.5 | 1 | | | 2.1 | 1.6 | | |
| | DSGGFMLT | | | | DSGGFMLT | | | |
| | AK918 | AK919 | | | AK918 | AK919 | | |
| # of samples with >1% Cleavage, activity | 5 | 4 | | | 3 | 5 | | |
| Frequency of cleavage, activation (%) | 17 | 13 | | | 10 | 17 | | |
| % Activation (Median) | 1.8 | 2.1 | | | 1.7 | 1.3 | | |

[0799] ii) In Vitro Cleavage Analysis: HEK Blue IL-12 and SDS-PAGE Analysis

[0800] Testing IL-12 molecules with HEK-Blue IL-12 cells:

[0801] REK-Blue IL-12 reporter cells developed by Invivogen have been specifically designed to monitor the activation of the JAK-STAT pathway. These cells were generated by stable transfection of HEK293 cells with the human IL-12Rβ1 and IL-12Rβ2 genes, along with the human TyK2, JAK2, and STAT4 genes to obtain a fully functional IL-12 signaling pathway. In addition, a STAT4-inducible SLAP reporter gene was also introduced. Upon stimulation, HEK-Blue™ IL-12 cells trigger the activation of STAT4 and the subsequent secretion of SEAP. The levels of STAT4-induced SEAP can be readily monitored using QUANTI-Blue™. FIEK-Blue IL-12 cells can be used to validate the functionality, toxicity, and variable dosage effects of human or murine HEK Blue IL-12 cells were grown in passage media until ˜80% confluent. Washed single-cell suspension in assay media was plated and serial dilutions of IL-12 molecules in assay media were added to cells. Plate was incubated at 37° C. for 24 h. After 24 h, Quanti-Blue solution (Invivogen) was prepared and cell supernatant was added to the Quanti-Blue solution and incubated for 1-2 h at 37° C. Absorbance at 625 nm measured. Data analysis was performed in Graphpad Prism, version 8.3. Background was subtracted from raw data and the data were fit nonlinearly: [Agonist] vs. response—Variable slope (four parameters). EC50 value of each IL-12 construct was reported.

[0802] Masking:

[0803] Results are shown in the tables below and in FIGS. 45, 46A and B.

| | Run 1, | | Run 2, | | Average |
|---|---|---|---|---|---|
| Construct | EC₅₀ | Aklusion | EC₅₀ | Aklusion | Aklusion |
| AK671 | 24.7 | N/A | 15.2 | N/A | N/A |
| rhIL-12 | 9.6 | N/A | 8.2 | N/A | N/A |
| AK386 null | 477.9 | 19.4 | 367.5 | 14.9 | 17.1 |
| AK664 null | 1854.0 | 75.2 | 1677.0 | 68.0 | 71.6 |
| AK665 null | 1303.0 | 52.9 | 1491.0 | 60.5 | 56.7 |
| AK666-01A null | 1775.0 | 72.0 | 2009.0 | 81.5 | 76.8 |
| AK666-02A null | 1725.0 | 70.0 | 1537.0 | 62.4 | 66.2 |
| AK667 null | 3104.0 | 125.9 | 2035.0 | 82.6 | 104.2 |
| AK668 null | 1383.0 | 56.1 | 1370.0 | 55.6 | 55.8 |
| AK669 null | 895.6 | 36.3 | 1193.0 | 48.4 | 42.4 |
| AK670 null | 740.9 | 30.1 | 862.1 | 35.0 | 32.5 |
| AK922 null | 1183.0 | 48.0 | 1101.0 | 44.7 | 46.3 |
| AK923 null | 1562.0 | 63.4 | 1188.0 | 48.2 | 55.8 |
| AK918 null | 2886.0 | 117.1 | 3116.0 | 126.4 | 121.7 |
| AK919 null | 1230.0 | 49.9 | 1475.0 | 59.8 | 54.9 |
| AK920 null | 1116.0 | 45.3 | 1116.0 | 45.3 | 45.3 |
| AK921 null | 1698.0 | 68.9 | 1352.0 | 54.8 | 61.9 |
| AK924 null | 1030.0 | 41.8 | 766.4 | 31.1 | 36.4 |
| AK925 null | 995.1 | 40.4 | 914.8 | 37.1 | 38.7 |

[0804] Parental AK671 is less potent than rhIL-12 (but not significantly, i.e. 3-fold). All masked constructs e more akluded than AK386. AK667 and AK918 are both >100-fold akluded.

[0805] As compared to AK386, the new molecules that have the GAG-binding domain mutation, the cysteines to serines mutations, new optimized linkers, as well as different cleavage sites, all exhibit improved masking.

[0806] Cleavage:

[0807] Cleavage of the constructs was testing using exemplary proteases MMP7, 9 and 10.

[0808] Batch 1

| | | 300 ng | Total construct cleaved. |
|---|---|---|---|
| AK ID | Protein Lot # | MMP | ug |
| AK663 | AK663-01A | 7 | 8.8 |
| AK664 | AK664-01A | 7 | 14.8 |
| AK665 | AK665-01A | 7 | 14.8 |
| AK666 | AK666-01A | 7 | 14.8 |
| AK667 | AK667-01A | 10 | 14.9 |
| AK668 | AK668-01A | 10 | 14.9 |
| AK669 | AK669-01A | 2 | 14.9 |
| AK670 | AK670-01A | 2 | 14.9 |
| AK671 | AK671-01A | 7 | 11.3 |
| AK672 | AK672-03A | 7 | 14.9 |
| AK673 | AK673-01A | 7 | 15.1 |

[0809] Results are shown in FIGS. 47A-B and 48A-K

[0810] Batch 2

| | | 30 ng | Total construct cleaved. |
|---|---|---|---|
| AK ID | Protein Lot # | MMP | ug |
| AK667 | AK667-01A | 7, 9, 10 | 14.86 |
| AK671 | AK671-01A | 7, 9, 10 | 11.31 |
| AK918 | AK918-01A | 7 | 14.84 |
| AK919 | AK919-01A | 7 | 14.85 |
| AK920 | AK920-01A | 9 | 14.83 |
| AK921 | AK921-01A | 9 | 14.94 |
| AK386 | AK386-03A | 7 | 14.90 |

[0811] Results are shown in FIGS. 49A-B and 50A-G

[0812] Batch 3

| | | 300 ng | Total construct cleaved. |
|---|---|---|---|
| AK ID | Protein Lot # | MM | ug |
| AK386 | AK386-04A | 7, 10 | 14.9 |
| AK922 | AK922-01A | 7 | 14.9 |
| AK923 | AK923-01A | 7 | 14.9 |
| AK924 | AK924-01A | 10 | 14.8 |
| AK925 | AK925-01A | 10 | 14.9 |
| AK871 | AK671-02A | N/A | N/A |

[0813] Results are in FIGS. 51 and 52A-E

[0814] Overall, the new molecules with different cleavage sites are all susceptible to MMP cleavage in vitro. For all the molecules, there is a restoration of activity post cleavage. These compounds represent good candidates for tumor selective activable IL-12 molecules.

### Example 9

[0815] i. Cleavage of Peptides by NAT vs. RCC Culture Supernatant

[0816] Sequences comprising cleavage peptides (shown in bold below) were incubated in either ‘NAT’ (Norma Adjacent Tissue) or ‘RCC’ (Renal Cell Carcinoma) culture supernatants, to test the specificity of each peptide's cleavage.

[0817] To this end, peptide sequencing by mass spectrometry was used to identify cleaved fragments produced for the synthetic peptides shown in the table below, using a published technique called multiplexed substrate profiling by mass spectrometry (MSP-MS) (O'Donoghue A. J. et al. Nat Methods. 2012 November; 9(11):1095-100.) Cleavages were monitored in these reactions over time, and the peptides found to be cleaved in the earliest time points were deemed to be most sensitive to proteolytic activity in the conditioned media samples.

[0818] Results are as follows:

| | Synthetic | | | | | |
|---|---|---|---|---|---|---|
| | Peptide | | | | | |
| | Sequence | | | | | |
| | (bolded | | | | | |
| | sequences | | | | | |
| | show | | | | | |
| | the | | | Ear- | Ear- | |
| | cleavable | | | liest | liest | |
| | peptide; | | | cleaved | cleaved | |
| | * indicates | | | time | time | |
| Sub- | cleavage | | | point | point | |
| strate | site) | NAT | RCC | -NAT | -RCC | |
| AK-15 | RSGVPLS*L | 0 | 3/5 | | 15 | min |
| | YSGSGGGK | | | | | |
| AK-18 | RSGMP*YD | 5/5 | 5/5 | 15 | 15 | min |
| | LY*HPSGK | | | min | | |
| AK-21 | RGPDSGGF*M | 3/5 | 5/5 | 15 | 15 | min |
| | L*TSGK | | | min | | |
| AK-28 | RGSGHEQLT | 0 | 0 | | | |
| | VSGGSK | | | | | |
| AK-49 | RSGR*AAAV | 0 | 3/5 | | 15-60- | |
| | KSPSGK | | | | 240 | min |
| AK-02 | RGSGISSGL | 5/5 | 5/5 | 15-60 | 15-60 | min |
| | LSGRS*D*N | | | min | | |
| | *HSG | | | | | |
| AK-50 | KRGDLLAV | 0 | 5/5 | | 15-60 | min |
| | VA*ASGGK | | | | | |
| AK-88 | RGGISSGL | 0 | 5/5 | | 15-60 | min |
| | L*SG*RSGK | | | | | |

[0819] Cleavage peptides DLLAVVA*AS and ISSGLL*SG*RS were found to be the most specific. Sequences comprising these peptides did not cleave in the NAT culture, but cleaved in every run in the RCC culture,

### Example 10

[0820] The following constructs were used in this example:

[0821] Details on the domain features and sequences of each AK molecule is as follows:

| | | |
|---|---|---|
| AK904 | 1^{st} polypeptide | DKTHTCPPCPAPELL DNA158 |
| | chain: | GGPSVFLFPPKPKDT |
| | Fc(Hole) | LMISRTPEVTCVVVD |
| | | VSHEDPEVKFNWYVD |
| | | GVEVHNAKTKPREEQ |
| | | YASTYRVVSVLTVLH |
| | | QDWLNGKEYKCKVSN |
| | | KALPAPIEKTISKAK |
| | | GQPREPQVCTLPPSR |
| | | DELTKNQVSLSCAVK |
| | | GFYPSDIAVEWESNG |
| | | QPENNYKTTPPVLDS |
| | | DGSFFLVSKLTVDKS |
| | | RWQQGNVFSCSVMHE |
| | | ALHNHYTQKSLSLSP |
| | | GK |
| | 2^{nd} polypeptide | DKTHTCPPCPAPELL AK904 |
| | chain: | GGPSVFLFPPKPKDT |
| | Fc(knob)-IL15 | LMISRTPEVTCVVVD |
| | V1 Non- | VSHEDPEVKFNWYVD |
| | cleavable | GVEVHNAKTKPREEQ |
| | (N71Q, N790) | YASTYRVVSVLTVLH |
| | | QDWLNGKEYKCKVSN |
| | | KALPAPIEKTISKAK |
| | | GQPREPQVYTLPPCR |
| | | DELTKNQVSLWCLVK |
| | | GFYPSDIAVEWESNG |
| | | QPENNYKTTPPVLDS |
| | | DGSFFLYSKLTVDKS |
| | | RWQQGNVFSCSVMHE |
| | | ALHNHYTQKSLSLSP |
| | | GGGSSPPGGGSSGGG |
| | | SGPSGSPGNWVNVIS |
| | | DLKKIEDLIQSMHID |
| | | ATLYTESDVHPSCKV |
| | | TAMKCFLLELQVISL |
| | | ESGDASIHDTVENLI |
| | | ILAQNSLSSNGQVTE |
| | | SGCKECEELEEKNIK |
| | | EFLQSFVHIVQMFIN |
| | | TS |
| AK910 | 1^{st} polypeptide | DKTHTCPPCPAPELL DNA440 |
| | chain: | GGPSVFLFPPKPKDT |
| | Fc(Hole) | LMISRTPEVTCVVVD |
| | CD122 (C122S, | VSHEDPEVKFNWYVD |
| | C168S) | GVEVHNAKTKPREEQ |
| | | YASTYRVVSVLTVLH |
| | | QDWLNGKEYKCKVSN |
| | | KALPAPIEKTISKAK |
| | | GQPREPQVCTLPPSR |
| | | DELTKNQVSLSCAVK |
| | | GFYPSDIAVEWESNG |
| | | QPENNYKTTPPVLDS |
| | | DGSFFLVSKLTVDKS |
| | | RWQQGNVFSCSVMHE |
| | | ALHNHYTQKSLSLSP |
| | | GPGSGSAVNGTSQFT |
| | | CFYNSRANISCVWSQ |
| | | DGALQDTSCQVHAWP |
| | | DRRRWNQTCELLPVS |
| | | QASWACNLILGAPDS |
| | | QKLTTVDIVTLRVLC |
| | | REGVRWRVMAIQDFK |
| | | PFENLRLMAPISLQV |
| | | VHVETHRSNISWEIS |
| | | QASHYFERHLEFEAR |
| | | TLSPGHTWEEAPLLT |
| | | LKQKQEWISLETLTP |
| | | DTQYEFQVRVKPLQG |
| | | EFTTWSPWSQPLAFR |
| | | TKPAALGKD |
| | 2^{nd} polypeptide | DKTHTCPPCPAPELI DNA904 |
| | chain: | GGPSVFLFPPKPKDT |
| | Fc(knob)-IL15 | LMISRTPEVTCVVVD |
| | V1 Non- | VSHEDPEVKFNWYVD |
| | cleavable | GVEVHNAKTKPREEQ |
| | (N71Q, N79Q) | YASTYRVVSVLTVLH |
| | | QDWLNGKEYKCKVSN |
| | | KALPAPIEKTISKAK |
| | | GQPREPQVYTLPPCR |
| | | DELTKNQVSLWCLVK |
| | | GFYPSDIAVEWESNG |
| | | QPENNYKTTPPVLDS |
| | | DGSFFLYSKLTVDKS |
| | | RWQQGNVFSCSVMHE |
| | | ALHNHYTQKSLSLSP |
| | | GGGSSPPGGGSSGGG |
| | | SGPSGSPGNWVNVIS |
| | | DLKKIEDLIQSMHID |
| | | ATLYTESDVHPSCKV |
| | | TAMKCFLLELQVISL |
| | | ESGDASIHDTVENLI |
| | | ILAQNSLSSNGQVTE |
| | | SGCKECEELEEKNIK |
| | | EFLQSFVHIVQMFIN |
| | | TS |
| AK932 | 1^{st} polypeptide | DKTHTCPPCPAPELL DNA440 |
| | chain: | GGPSVFLFPPKPKDT |
| | Fc(Hole) | LMISRTPEVTCVVVD |
| | CD122(C122S, | VSHEDPEVKFNWYVD |
| | C168S) | GVEVHNAKTKPREEQ |
| | | YASTYRVVSVLTVLH |
| | | QDWLNGKEYKCKVSN |
| | | KALPAPIEKTISKAK |
| | | GQPREPQVCTLPPSR |
| | | DELTKNQVSLSCAVK |
| | | GFYPSDIAVEWESNG |
| | | QPENNYKTTPPVLDS |
| | | DGSFFLVSKLTVDKS |
| | | RWQQGNVFSCSVMHE |
| | | ALHNHYTQKSLSLSP |
| | | GPGSGSAVNGTSQFT |
| | | CFYNSRANISCVWSQ |
| | | DGALQDTSCQVHAWP |
| | | DRRRWNQTCELLPVS |
| | | QASWACNLILGAPDS |
| | | QKLTTVDIVTLRVLC |
| | | REGVRWRVMAIQDFK |
| | | PFENLRLMAPISLQV |
| | | VHVETHRSNISWEIS |
| | | QASHYFERHLEFEAR |
| | | TLSPGHTWEEAPLLT |
| | | LKQKQEWISLETLTP |
| | | DTQYEFQVRVKPLQG |
| | | EFTTWSPWSQPLAFR |
| | | TKPAALGKD |
| | 2^{nd} polypeptide | DKTHTCPPCPAPELL DNA924 |
| | chain: | GGPSVFLFPPKPKDT |
| | Fc(knob)- | LMISRTPEVTCVVVD |
| | (DLLAVVAAS | VSHEDPEVKFNWYVD |
| | 1-IL15 | GVEVHNAKTKPREEQ |
| | (N71Q, N790) | YASTYRVVSVLTVLH |
| | *cleavable | QDWLNGKEYKCKVSN |
| | peptide bolded | KALPAPIEKTISKAK |
| | | GQPREPQVYTLPPCR |
| | | DELTKNQVSLWCLVK |
| | | GFYPSDIAVEWESNG |
| | | QPENNYKTTPPVLDS |
| | | DGSFFLYSKLTVDKS |
| | | RWQQGNVFSCSVMHE |
| | | ALHNHYTQKSLSLSP |
| | | GSGSDLLAVVAASSG |
| | | PGSGNWVNVISDLKK |
| | | IEDLIQSMHIDATLY |
| | | TESDVHPSCKVIAMK |
| | | CFLLEILQVISLESG |
| | | DASIHDTVENLIILA |
| | | QNSLSSNGQVTESGC |
| | | KECEELEEKNIKEFL |
| | | QSFVHIVQMFINTS |
| AK938 | 1^{st} polypeptide | DKTHTCPPCPAPELL DNA822 |
| | chain: | GGPSVFLFPPKPKDT |
| | Fo(hole)- | LMISRTPEVTCVVVD |
| | [DLLAVVAAS] | VSHEDPEVKFNWYVD |
| | -CD122 | GVEVHNAKTKPREEQ |
| | *cleavable | YASTYRVVSVLTVLH |
| | peptide bolded | QDWLNGKEYKCKVSN |
| | | KALPAPIEKTISKAK |
| | | GQPREPQVCTLPPSR |
| | | DELTKNQVSLSCAVK |
| | | GFYPSDIAVEWESNG |
| | | QPENNYKTTPPVLDS |
| | | DGSFFLVSKLTVDKS |
| | | RWQQGNVFSCSVMHE |
| | | ALUNHYTQKSLSLSP |
| | | GSGSPSGDLLAVVAA |
| | | SSGPGSGSPAVNGTS |
| | | QFTCFYNSRANISCV |
| | | WSQDGALQDTSCQVH |
| | | AWPDRRRWNQTCELL |
| | | PVSQASWACNLILGA |
| | | PDSQKLTTVDIVTLR |
| | | VLCREGVRWRVMAIQ |
| | | DFKPFENLRLMAPIS |
| | | LQVVHVETHRSNISW |
| | | EISQASHYFERHLEF |
| | | EARTLSPGHTWEEAP |
| | | LLTLKQKQEWISLET |
| | | LTPDTQYEFQVRVKP |
| | | LQGEFTTWSPWSQPL |
| | | AFRTKPAALGKD |
| | 2^{nd} polypeptide | DKTHTCPPCPAPELL DNA904 |
| | chain: | GGPSVFLFPPKPKDT |
| | Fo(knob)-IL15 | LMISRTPEVTCVVVD |
| | V1 Non- | VSHEDPEVKFNWYVD |
| | cleavable | GVEVHNAKTKPREEQ |
| | (N71Q, N79Q) | YASTYRVVSVLTVLH |
| | | QDWLNGKEYKCKVSN |
| | | KALPAPIEKTISKAK |
| | | GQPREPQVYTLPPCR |
| | | DELTKNQVSLWCLVK |
| | | GFYPSDIAVEWESNG |
| | | QPENNYKTTPPVLDS |
| | | DGSFFLYSKLTVDKS |
| | | RWQQGNVFSCSVMHE |
| | | ALHNHYTQKSLSLSP |
| | | GGGSSPPGGGSSGGG |
| | | SGPSGSPGNWVNVIS |
| | | DLKKIEDLIQSMHID |
| | | ATLYTESDVHPSCKV |
| | | TAMKCFLLELQVTSL |
| | | ESGDASIHDTVENLI |
| | | ILAQNSLSSNGQVTE |
| | | SGCKECEELEEKNIK |
| | | EFLQSFVHIVQMFIN |
| | | TS |
| AK930 | 1^{st} polypeptide | DKTHTCPPCPAPELL DNA440 |
| | chain: | GGPSVFLFPPKPKDT |
| | Fc(Hole) | LMTSRTPEVTCVVVD |
| | CD122(C122S, | VSHEDPEVKFNWYVD |
| | C168S) | GVEVHNAKTKPREEQ |
| | | YASTYRVVSVLTVLH |
| | | QDWLNGKEYKCKVSN |
| | | KALPAPIEKTISKAK |
| | | GQPREPQVCTLPPSR |
| | | DELTKNQVSLSCAVK |
| | | GFYPSDIAVEWESNG |
| | | QPENNYKTTPPVLDS |
| | | DGSFFLVSKLTVDKS |
| | | RWQQGNVFSCSVMHE |
| | | ALHNHYTQKSLSLSP |
| | | GPGSGSAVNGTSQFT |
| | | CFYNSRANISCVWSQ |
| | | DGALQDTSCQVHAWP |
| | | DRRRWNQTCELLPVS |
| | | QASWACNLILGAPDS |
| | | QKLTTVDIVTLRVLC |
| | | REGVRWRVMAIQDFK |
| | | PFENLRLMAPISLQV |
| | | VHVETHRSNISWEIS |
| | | QASHYFERHLEFEAR |
| | | TLSPGHTWEEAPLLT |
| | | LKQKQEWISLETLTP |
| | | DTQYEFQVRVKPLQG |
| | | EFTTWSPWSQPLAFR |
| | | TKPAALGKD |
| | 2^{nd} polypeptide | DKTHTCPPCPAPELL DNA922 |
| | chain: | GGPSVFLFPPKPKDT |
| | Fc(knob)- | LMISRTPEVTCVVVD |
| | [ISSGLLSGRS] | VSHEDPEVKFNWYVD |
| | -IL15 | GVEVHNAKTKPREEQ |
| | (N71Q, N790) | YASTYRVVSVLTVLH |
| | *cleavable | QDWLNGKEYKCKVSN |
| | peptide bolded | KALPAPIEKTISKAK |
| | | GQPREPQVYTLPPCR |
| | | DELTKNQVSLWCLVK |
| | | GFYPSDIAVEWESNG |
| | | QPENNYKTTPPVLDS |
| | | DGSFFLYSKLTVDKS |
| | | RWQQGNVFSCSVMHE |
| | | ALHNHYTQKSLSLSP |
| | | GGGSSGGSPISSGLL |
| | | SGRSSGPGSGSNWVN |
| | | VISDLKKIEDLIQSM |
| | | HIDATLYTESDVHPS |
| | | CKVTAMKCFLLELQV |
| | | ISLESGDASIHDTVE |
| | | NLIILAQNSLSSNGQ |
| | | VTESGCKECEELEEK |
| | | NIKEFLQSFVHIVQM |
| | | FINTS |
| AK936 | 1^{st} polypeptide | DKTHTCPPCPAPELL DNA823 |
| | chain: | GGPSVFLFPPKPKDT |
| | Fc(hole)- | LMISRTPEVTCVVVD |
| | [ISSGLLSGRS] | VSHEDPEVKFNWYVD |
| | -CD122 | GVEVHNAKTKPREEQ |
| | | YASTYRVVSVLTVLH |
| | | QDWLNGKEYKCKVSN |
| | | KALPAPIEKT1SKAK |
| | | GQPREPQVCTLPPSR |
| | | DELTKNQVSLSCAVK |
| | | GFYPSDIAVEWESNG |
| | | QPENNYKTTPPVLDS |
| | | DGSFFLVSKLTVDKS |
| | | RWQQGNVFSCSVMHE |
| | | ALHNHYTQKSLSLSP |
| | | GGPPSGSSPISSGLL |
| | | SGRSSGGGAVNGTSQ |
| | | FTCFYNSRANISCVW |
| | | SQDGALQDTSCQVHA |
| | | WPDRRRWNQTCELLP |
| | | VSQASWACNLILGAP |
| | | DSQKLTTVDIVTLRV |
| | | LCREGVRWRVMAIQD |
| | | FKPFENLRLMAPISL |
| | | QVVHVETHRSNISWE |
| | | ISQASHYFERHLEFE |
| | | ARTLSPGHTWEEAPL |
| | | LTLKQKQEWISLETL |
| | | TPDTQYEFQVRVKPL |
| | | QGEHTTWSPWSQPLA |
| | | FRTKPAALGKD |
| | 2^{nd} polypeptide | DKTHTCPPCPAPELL DNA904 |
| | chain: | GGPSVFLFPPKPKDT |
| | Fc(knob)-IL15 | LMISRTPEVTCVVVD |
| | V1 Non- | VSHEDPEVKFNWYVD |
| | cleavable | GVEVHNAKTKPREEQ |
| | (N71Q, N79Q) | YASTYRVVSVLTVLH |
| | | QDWLNGKEYKCKVSN |
| | | KALPAPIEKTISKAK |
| | | GQPREPQVYTLPPCR |
| | | DELTKNQVSLWCLVK |
| | | GFYPSDIAVEWESNG |
| | | QPENNYKTTPPVLDS |
| | | DGSFFLYSKLTVDKS |
| | | RWQQGNVFSCSVMHE |
| | | ALHNHYTQKSLSLSP |
| | | GGGSSPPGGGSSGGG |
| | | SGPSGSPGNWVNVIS |
| | | DLKKIEDLIQSMHID |
| | | ATLYTESDVHPSCKV |
| | | TAMKCFLLELQVISL |
| | | ESGDASIHDTVENLI |
| | | ILAQNSLSSNGQVTI |
| | | SGCKECEELEEKNIK |
| | | EFLQSFVHIVQMFIN |
| | | TS |

[0822] Importantly, AK932 and AK930, and their ‘flipped’ counterparts AK938 and AK936 include a peptide substrate (the sequence of which is depicted in the box above each molecule and bolded in the sequence table table). AK904 is a non-cleavable unmasked construct, and AK910 is a non-cleavable masked. construct, both acting as negative controls.

[0823] The above AK molecules include an IL-15 domain, however it will be appreciated that however the results and conclusions of this data are equally relevant for IL-2 constructs.

[0824] Cleavage was achieved for masked constructs eluding a peptide substrate.

[0825] Constructs were incubated with MMP7, 9 and 10. Cleavage for each construct was analysed by SDS-PAGE and confirmed by HEK-Blue IL-2 bioassay.

[0826] The HEK-Blue assay was carried out as follows:

[0827] Conditions: Cell plate: 96 well plate. Cell density: 50K cls/well. T point for HEK. Blue detection were tested: 1 h Construct number: Total 14 constructs that were tested.

[0828] Assay Flow chart:

[0829] The results are shown in the table below, where a ‘X’ indicates not fully cleaved and a ‘√’ indicates cleavage:

| ID | MMP | Cleavage |
|---|---|---|
| AK904 | 7 | X |
| | 9 | X |
| | 10 | X |
| AK910 | 7 | X |
| | 9 | X |
| | 10 | X |
| AK932 | 7 | √ |
| | 9 | — |
| | 10 | — |
| AK938 | 7 | √ |
| | 9 | — |
| | 10 | — |
| AK930 | 7 (36 hr) | √ |
| | 9 | — |
| | 10 | — |
| AK936 | 7 | √ |
| | 9 | — |
| | 10 | — |

[0830] The specific EC₅₀ readout results from the HEK-Blue IL-2 bioassay are shown in the table below.

| | | | |
|---|---|---|---|
| AK910 (1:1:2) | — | 1219.34 | 1.31 |
| | 7 | 284.17 | 1.42 |
| | 9 | 519.09 | 1.40 |
| | 10 | 490.52 | 1.40 |
| AK932 (1:1:2) | — | 2403.11 | 1.22 |
| | 7 | 9.30 | 1.43 |
| | 9 | — | — |
| | 10 | — | — |
| AK938 (1:1:2) | — | 885.13 | 1.31 |
| | 7 | 18.03 | 1.38 |
| | 9 | — | — |
| | 10 | — | — |
| AK930 (1:1:2) | — | 1858.76 | 1.22 |
| | 7 | 8.00 | 1.41 |
| | 9 | — | — |
| | 10 | — | — |
| AK936 (1:1:2) | — | 785.85 | 1.37 |
| | 7 | 16.11 | 1.40 |
| | 9 | — | — |
| | 10 | — | — |

[0831] The SDS-PAGE gel results are shown in FIGS. 53A-D. The HEK-Blue IL-2 bioassay results are shown in FIGS. 54A-F.

### Example 11

[0832] To understand the pharmacokinetic and pharmacodynamic profile of exemplary tumor-targeted hybrid murinized molecules in vivo, three molecules constructed with human Fc and mouse IL-12 with different cleavage sites were tested.

[0833] AK944(MPYDLYHP), AK945(ISSGLLSGRS), AK947(RAAAVKSP) were used in 2 tumor models, MB49 and B16F10, and parental AK948 without masking was used as control.

[0834] Details of the constructs used in this example are as follows:

[0835] Sequences of the mature mouse IL-12 p40 and L-12 p35 subunits, and mouse IL-12R masking moiety used in the molecules are as follows:

Mouse IL-12 p40 subunit:
MWELEKDVYVVEVDWTPDAPGETVNLTCDTPEEDD
ITWTSDQRHGVIGSGKTLTITVKEFLDAGQYTCHK
GGETLSHSHLLLHKKENGIWSTEILKNFKNKTFLK
CEAPNYSGRFTCSWLVQRNMDLKFNIKSSSSSPDS
RAVTCGMASLSAEKVTLDQRDYEKYSVSCQEDVTC
PTAEETLPIELALEARQQNKYENYSTSFFIRDIIK
PDPPKNLQMKPLKNSQVEVSWEYPDSWSTPHSYFS
LKFFVRIQRKKEKMKETEEGCNQKGAFLVEKTSTE
VQCKGGNVCVQAQDRYYNSSCSKWACVPCRVRS
Mouse IL-12 35 subunit:
RVIPVSGPARCLSQSRNLLKTTDDMVKTAREKLKH
YSCTAEDIDHEDITRDQTSTLKTCLPLELHKNESC
LATRETSSTTRGSCLPPQKTSLMMTLCLGSIYEDL
KMYQTEFQAINAALQNHNHQQIILDKGMLVAIDEL
MQSLNHNGETLRQKPPVGEADPYRVKMKLCILLHA
FSTRVVTINRVMGYLSSA
Mouse IL-12R masking moeity:
LYHPSGPMWELEKDVYVVEVDWTPDAPGETVNLTC
DTPEEDDITWTSDQRHGVIGSGKTLTITVKEFLDA
GQYTCHKGGETLSHSHLLLHKKENGIWSTEILKNF
KNKTFLKCEAPNYSGRFTCSWLVQRNMDLKFNIKS
SSSSPDSRAVTCGMASLSAEKVTLDQRDYEKYSVS
CQEDVTCPTAEETLPIELALEARQQNKYENYSTSF
FIRDIIKPDPPKNLQMKPLKNSQVEVSWEYPDSWS
TPHSYFSLKFFVRIQRKKEKMKETEEGCNQKGAFL
VEKTSTEVQCKGGNVCVQAQDRYYNSSCSKWACVP
CRVRSGGGGSGGGGSGGGGSRVIPVSGPARCLSQS
RNLLKTTDDMVKTAREKLKHYSCTAEDIDHEDIIR
DQTSTLKTCLPLELHKNESCLATRETSSTTRGSCL
PPQKTSLMMTLCLGSIYEDLKMYQTEFQAINAALQ
NHNHQQIILDKGMLVAIDELMQSLNHNGETLRQKP
PVGEADPYRVKMKLCILLHAFSTRVVTINRVMGYL
SSA

[0836] Full sequence information for each molecule is shown in the table below (cleavable linkers shown in bold, non-cleavable linkers shown in underline):

| | | | |
|---|---|---|---|
| AK944 | 1^{st} polypeptide | DKTHTCPPCPAPELLGGPSVFLFPPKPKDTLMI | DNA909 |
| | chain | SRTPEVTCVVVDVSHEDPEVKFNWYVDGVEVHNA | |
| | Hole: hFc | KTKPREEQYASTYRVVSVLTVLHQDWLNGKEY | |
| | (N297A)- | KCKVSNKALPAPIEKTISKAKGQPREPQVCTLPPS | |
| | mouse | RDELTKNQVSLSCAVKGFYPSDIAVEWESNGQP | |
| | IL12RB2 | ENNYKTTPPVLDSDGSFFLVSKLTVDKSRWQQG | |
| | | NVFSCSVMHEALHNHYTOKSLSLSPGGGSGGG | |
| | | SGNIDVCKLGTVTVQPAPVIPLGSAANISCSLNP | |
| | | KQGCSHYPSSNELILLKFVNDVLVENLHGKKVH | |
| | | DHTGHSSTFQVTNLSLGMTLFVCKLNCSNSQKK | |
| | | PPVPVCGVEISVGVAPEPPQNISCVQEGENGTV | |
| | | ACSWNSGKVTYLKTNYTLQLSGPNNLTCQKQC | |
| | | FSDNRQNCNRLDLGINLSPDLAESRFIVRVTAI | |
| | | NDLGNSSSLPHTFTFLDIVIPLPPWDIRINFLNA | |
| | | SGSRGTLQWEDEGQVVLNQLRYQPLNSTSWNM | |
| | | VNATNAKGKYDLRDLRPFTEYEFQISSKLHLSG | |
| | | GSWSNWSESLRTRTPEE | |
| | 2^{nd} polypeptide | DKTHTCPPCPAPELLGGPSVFLFPPKPKDTLMI | DNA911 |
| | chain | SRTPEVTCVVVDVSHEDPEVKFNWYVDGVEV | |
| | Knob: hFc | HNAKTKPREEQYASTYRVVSVITVIHQDWL | |
| | (N297A)- | NGKEYKCKVSNKALPAPIEKTISKAKGQPREP | |
| | [MPYDLYHP]- | QVYTLPPCRDELTKNQVSLWCLVKGFYPSDI | |
| | mouseIL12 | AVEWESNGQPENNYKTTPPVLDSDGSFFLYS | |
| | | KLTVDKSRWQQGNVFSCSVMHEALHNHYTQ | |
| | | KSLSLSPGGGSGGSGGSMPYDLYHPSGPMWE | |
| | | LEKDVYVVEVDWTPDAPGETVNLTCDTPEE | |
| | | DDITWTSDQRHGVIGSGKTLTITVKEFLDAG | |
| | | QYTCHKGGETLSHSHLLLHKKENGIWSTEIL | |
| | | KNFKNKTFLKCEAPNYSGRFTCSWLVQRNM | |
| | | DLKFNIKSSSSSPDSRAVTCGMASLSAEKVT | |
| | | LDQRDYEKYSVSCQEDVTCPTAEETLPIELA | |
| | | LEARQQNKYENYSTSFFIRDIIKPDPPKNLQMK | |
| | | PLKNSQVEVSWEYPDSWSTPHSYFSLKFFVRI | |
| | | QRKKEKMKETEEGCNQKGAFLVEKTSTEVQ | |
| | | CKGGNVCVQAQDRYYNSSCSKWACVPCRV | |
| | | RSGGGGSGGGGSGGGGSRVIPVSGPARCLSQS | |
| | | RNLLKTTDDMVKTAREKLKHYSCTAEDIDHE | |
| | | DITRDQTSTLKTCLPLELHKNESCLATRETSST | |
| | | TRGSCLPPQKTSLMMTLCLGSIYEDLKMYQT | |
| | | EFQAINAALQNHNHQQIILDKGMLVAIDELMQ | |
| | | SLNHNGETLRQKPPVGEADPYRVKMKICILLH | |
| | | AFSTRVVTINRVMGYLSSA | |
| AK945 | 1^{st} polypptide | DKTHTCPPCPAPELLGGPSVFLFPPKPKDTLMISR | DNA909 |
| | chain | TPEVTCVVVDVSHEDPEVKFNWYVDGVEVHNA | |
| | Hole: hFc | KTKPREEQYASTYRVVSVLTVLHQDWLNGKEY | |
| | (N297A)- | KCKVSNKALPAPIKTISKAKGQPRIPQVCTLPPS | |
| | mouseIL 12RB2 | RDELTKNQVSLSCAVKGFYPSDIAVEWESNGQP | |
| | | ENNYKTTPPVLDSDGSFFLVSKLTVDKSRWQQG | |
| | | NVFSCSVMHEALHNHYTOKSLSLSPGGGSGGG | |
| | | SGNIDVCKLGTVTVQPAPVIPLGSAANISCSLNP | |
| | | KQGCSHYPSSNELILLKFVNDVLVENLHGKKVH | |
| | | DHTGHSSTFQVTNLSLGMTLFVCKLNCSNSQKK | |
| | | PPVPVCGVEISVGVAPEPPQNISCVQEGENGTV | |
| | | ACSWNSGKVTYLKTNYTLQLSGPNNLTCQKQC | |
| | | FSDNRQNCNRLDLG1NLSPDLAESRFIVRVTAI | |
| | | NDLGNSSSLPHTFTFLDIVIPLPPWDIRINFLNA | |
| | | SGSRGTLQWEDEGQVVLNQLRYQPLNSTSWNM | |
| | | VNATNAKGKYDLRDLRPFTEYEFQISSKLHLSG | |
| | | GSWSNWSESLRTRTPEE | |
| | 2^{nd} polypeptide | DKTHTCPPCPAPELLGGPSVTLFPPKPKDTLMISR | DNA912 |
| | chain | TPEVTCWVDVSHEDPEVKFNWYVDGVEVHNA | |
| | Knob: hFc | KTKPREEQYASTYRVVSVLTVLHQDWLNGKEYK | |
| | (N297A)- | CKVSNKALPAPIEKTISKAKGQPREPQVYTLPPC | |
| | [RAAAVKSP] | RPELTKNQVSLWCLVKGFYPSDIAVEWESNGQP | |
| | mouselL12 | ENNYKTTPPVLDSDGSFFLYSKLTVDKSRWQQG | |
| | | NVFSCSVMHEALHNHYTQKSLSLSPGGGSGGSG | |
| | | GSISSGLLSGRSSGPMWELEKDVYVVEVDWTPD | |
| | | APGETVNLTCDTPEEDDITWTSDQRHGVIGSGKT | |
| | | LTITVKEFLDAGQYTCHKGGETLSHSHLLLHKKE | |
| | | NGIWSTEILKNFKNKTFLKCEAPNYSGRFTCSWL | |
| | | VQRNMDLKFN1KSSSSSPDSRAVTCGMASLSAEK | |
| | | VTLDQRDYEKYSVSCQEDVTCPTAEETLPIELALE | |
| | | ARQQNKYENYSTSFFIRDIIKPDPPKNLQMKPLKN | |
| | | SQVEVSWEYPDSWSTPHSYFSLKFFVRIQRKKEK | |
| | | MKETEEGCNQKGAFLVEKTSTEVQCKGGNVCVQ | |
| | | AQDRYYNSSCSKWACVPCRVRSGGGGSGGGGS | |
| | | GGGGSRVIPVSGPARCLSQSRNLLKTTDDMVKT | |
| | | AREKLKHYSCTAEDIDHEDITRDQTSTLKTCLPL | |
| | | ELHKNESCLATRETSSTTRGSCLPPQKTSLMMTL | |
| | | CLGSIYEDLKMYQTEFQAINAALQNHNHQQIILD | |
| | | KGMLVAIDELMQSLNHNGETLRQKPPVGEADPY | |
| | | RYTCMKLCILLHAFSTRWTINRVMGYLSSA | |
| AK947 | 1^{st} polypeptide | DKTHTCPPCPAPELLGGPSVFLFPPKPKDTLMISR | DNA909 |
| | chain | TPEVTCVVVDVSHEDPEVKFNWYVDGVEVHNA | |
| | Hole: hFc | iKTKPREEQYASTYRVVSVLTVLHQDWLNGKEY | |
| | (N297A)- | KCKVSNKALPAPIEKTISKAKGQPREPQVCTLPPS | |
| | mouseIL12RB2 | RDELTKNQVSLSCAVKGFYPSDIAVEWESNGQP | |
| | | ENNYKTTPPVLDSDGSFFLVSKLTVDKSRWQQG | |
| | | NVFSCSVMHEALHNHYTOKSLSLSPGGGSGGG | |
| | | SGNIDVCKLGTVTVQPAPVIPLGSAANISCSLNP | |
| | | KQGCSHYPSSNELILLKFVNDVLVENLHGKKVH | |
| | | DHTGHSSTFQVTNLSLGMTLFVCKLNCSNSQKK | |
| | | PPVPVCGVEISVGVAPEPPQNISCVQEGENGTV | |
| | | ACSWNSGKVTYLKTNYTLQLSGPNNLTCQKQC | |
| | | FSDNRQNCNRLDLGINLSPDLAESRFIVRVTAI | |
| | | NDLGNSSSLPHTFTFLDIVIPLPPWDIRINFLNA | |
| | | SGSRGTLQWEDEGQVVLNQLRYQPLNSTSWNM | |
| | | VNATNAKGKYDLRDLRPFTEYEFQISSKLHLSG | |
| | | GSWSNWSESLRTRTPEE | |
| | 2^{nd} polypeptide | DKTHTCPPCPAPELLGGPSVFLFPPKPKDTLMISRT | DNA914 |
| | chain | PEVTCVVVDVSHEDPEVKFNWYVDGVEVHNAKT | |
| | Knob: hFc | KPREEQYASIYRVVSVLTVLHQDWLNGKEYKCK | |
| | (N297A)- | VSNKALPAPIEKTISKAKGQPREPQVYTLPPCRDEL | |
| | [RAAAVKSP]- | TKNQVSLWCLVKGFYPSDIAVEWESNGQPENNYK | |
| | mouseIL12 | TTPPVLDSDGSFFLYSKLTVDKSRWQQGNVFSCSV | |
| | | MHEALHNHYTQKSLSLSPGGGSGGSGGSRAAAVK | |
| | | SPSGPMWELEKDVYVVEV | |
| | | DWTPDAPGETVNLTCDTPEEDDITWTSDQRHGVIG | |
| | | SGKITTITVKEFLDAGQYTCHKGGETLSHSHLLLH | |
| | | KKENGIWSTEILKNFKNKTFLKCEAPNYSGRFTCS | |
| | | WLVQRNMDLKFNIKSSSSSPDSRAVTCGMASLSA | |
| | | EKVTLDQRDYEKYSVSCQEDVTCPTAEETLPIELA | |
| | | 1LEARQQNKYENYSTSFFIRDIIKPDPPKNLQMKPL | |
| | | IKNSQVEVSWEYPDSWSTPHSYFSLKFFVRIQRKK | |
| | | IEKMKETEEGCNQKGAFLVEKTSTEVQCKGGNVC | |
| | | iVQAQDRYYNSSCSKWACVPCRVRSGGGGSGGG | |
| | | GSGGGGSRVIPVSGPARCLSQSRNILKTTDDMVK | |
| | | TAREKLKHYSCTAEDIDHEDITRDQTSTLKTCLPLE | |
| | | LHKNESCLATRETSSTTRGSCLPPQKTSLMMTLCL | |
| | | GSIYEDIKMYQTEFQAINAAIQNHNHQQIILDKGM | |
| | | IVAIDELMQSLNHNGETLRQKPPVGEADPYRVKM | |
| | | KLCILLHAFSTRVVTINRVMGYLSSA | |
| AK948 | 1^{st} polypeptide | DKTHTCPPCPAPELLGGPSVFLFPPKPKDTLMISR | DNA158 |
| | chain | TPEVTCVVVDVSHEDPEVKFNWYVDGVEVHNA | |
| | Hole: | KTKPREEQYASTYRVVSVLTVLHQDWLNGKEYK | |
| | (N297A) | CKVSNKALPAPIEKTISKAKGQPREPQVCTLPPSR | |
| | | [DELTKNQVSLSCAVKGFYPSDIAVEWESNGQPEN | |
| | | NYKTTPPVLDSDGSFFLVSKLTVDKSRWQQGNVF | |
| | 2^{nd} polypeptide | DKTHTCPPCPAPELLGGPSVFLFPPKPKDTLMISRT | DNA913 |
| | chain | PEVTCVVVDVSHEDPEVKFNWYVDGVEVHNAKT | |
| | Knob: | KPREEQYASTYRVVSVLTVLHQDWLNGKEYKCKV | |
| | hFc(N297A)- | SNKALPAPIEKTISKAKGQPREPQVYTLPPCRDELT | |
| | [DSGGFMLT]- | KNQVSLWCLVKGFYPSDIAVEWESNGQPENNYKT | |
| | mouselL12 | TPPVLDSDGSFFLYSKLTVDKSRWQQGNVFSCSVM | |
| | | HEALHNHYTQKSLSLSPGGGSGGSGGSDSGGFMLT | |
| | | SGPMWELEKDVYVVEVDWTPDAPGETVNLTCDT | |
| | | PEEDDITWTSDQRHGVIGSGKTLTITVKEFLDAGQ | |
| | | YTCHKGGETLSHSHLLLHKKENGIWSTEILKNFKN | |
| | | KTFLKCEAPNYSGRFTCSWLVQRNMDLKFNIKSS | |
| | | SSSPDSRAVTCGMASLSAEKVTLDQRDYEKYSVS | |
| | | CQEDVTCPTAEETLPIELALEARQQNKYENYSTSFF | |
| | | IRDIIKPDPPKNLQMKPLKNSQVEVSWEYPDSWSTP | |
| | | HSYFSLKFFVRIQRKKEKMKETEEGCNQKGAFLVE | |
| | | KTSTEVQCKGGNVCVQAQDRYYNSSCSKWACVPC | |
| | | RVRSGGGGSGGGGSGGGGSRV1PVSGPARCLSQS | |
| | | RNLLKTTDDMVKTAREKLKHYSCTAEDIDHEDITR | |
| | | DQTSTLKTCLPLELHKNESCLATRETSSTTRGSCLP | |
| | | iPQKTSLMMTLCLGSIYEDLKMYQTEFQAINAALQ | |
| | | NHNHQQIILDKGMLVAIDELMQSLNHNGETLRQK | |
| | | PPVGEADPYRVKMKLCILLHAFSTRVVTINRVMG | |
| | | 1YLSSA | |

[0837] In this study, C57BL/6 mice were inoculated subcutaneously with 1×10⁶ MB49 or 0.5×10⁶ B16F10 tumor cells. Treatments started when tumor sizes reached 300 mm³. The administration of molecules was through single i.v. injections at 0.5 or 3 mg/kg. The animals were euthanized five days post treatment started. Body weight and organ weight were recorded:

| Test | | Cleavage | M.W. | Apprx. Dosing | Actual Dosing | Actual Dosing | Batch |
|---|---|---|---|---|---|---|---|
| Molecule | | site | (kDa) | (mg/kg) | (nMoles/kg) | (mg/kg) | information |
| 1 | Mouse recombinant IL-12 | — | 75 | 0.5 | 3.6 | 0.27 | — |
| 2 | AK948 (parental) | — | 110.6 | 0.1 | 0.9 | 0.1 | 01A |
| 3 | AK948 (parental) | — | 110.6 | 0.5 | 3.6 | 0.4 | 01A |
| 4 | AK944 | MPYDLYHP | 145.7 | 1 | 3.6 | 0.5 | 01A |
| 5 | AK945 | ISSGLLSGRS | 145.7 | 1 | 3.6 | 0.5 | 02A |
| 6 | AK947 | RAAAVKSP | 145.5 | 1 | 3.6 | 0.5 | 02A |
| 7 | AK944 | MPYDLYHP | 145.7 | 3 | 20.6 | 3 | 01A |
| 8 | AK945 | ISSGLLSGRS | 145.7 | 3 | 20.6 | 3 | 02A |
| 9 | AK947 | RAAAVKSP | 145.5 | 3 | 20.6 | 3 | 02A |
| 10 | Vehicle | — | | | | | — |

| PD details | PK readouts |
|---|---|
| Take down at D5 (total 50 mice) | Therapy start at 300 mm³, (n = 5) |
| Immunophenotyping: CD8, CD4, Treg. | Single dose (i.v.) |
| CD25, PD-1, Ki-67, NK, ICOS* | Plasma collection |
| FACS | 25 uL: 5 min, 2 hr, 6 hr, 24 hr, D3, D5 |
| Bood spleen and tumor liver* | PK: Fc capture Fc detect in MSD format |
| Snap freeze spleen, kidney, tumor | mIFN-γ ELISA D3 |
| *= B16 only | |

| | |
|---|---|
| Models: | Material details |
| MB49 | C57BL/6 (n = 5 per group, 50 in total) |
| B16F10* | Material needed: 2 mg/molecule/model |

[0838] The following readouts were analysed:
[0839] Tumor growth inhibition: Tumor volume signifcantly decreased in AK945 and AK947 in B16 model.
[0840] Tumor weight: Single dose AK945 significantly decrease tumor weights at low dose in MB49.
[0841] % of body weight change: All masked molecules show protection against body weight loss.
[0842] Spleen weight: Spleen weights are increased in MB49 model but not B16. The difference in spleen weight from vehicle group between models could be tumor specific driven,
[0843] Lung weight (MB49 model only): Lung weights are not affected by IL-12 variants in MB49 model.

[0844] The results are shown in FIGS. 55-59.

[0845] FACS analysis was also used to investigate immune responses in tumor microenvironments in compared with multiple peripheral organs, including blood and spleen. Activation and/or expansion of CD8 T-cell, CD8 T-cell/T-reg ratio in the tumor microenvironment is of particular interest.

[0846] The following PD readouts were analysed:
[0847] CD45 in TME
[0848] CD8 T cell: CD8 T cell increased in tumor microenvironment with AK947 at high dose. AK947 also expand CD8 T cell peripheral.
[0849] CD8/Treg ratio: CD8/Treg ratio is increased in tumor microenvironment.
[0850] CD8 T cell proliferation: No difference in CD8 T cell proliferation in TME. CD8 T cell are more proliferative in TME than in peripheral.
[0851] CD8 activation marker: CD8 T cells are more activated in tumor microenvironment.

[0852] The results are shown in FIGS. 60-65

[0853] Finally, serum mouse ALT measurement was measured at day 5; mouse IFN-γ and TNF-α ELISA was performed using day 3 plasma to investigate downstream signalling activated by the tumor-targeted molecules.

[0854] The following readouts were analysed:
[0855] Toxicity—ALT assay: IL-12 variants do not induce liver toxicity at tow dose
[0856] D3 serum cytokines: Serum IFNγ expression is significantly lowered in masked IL-12 treated mice.

[0857] There is dose dependent increase in IFN-γ for all IL-12 variants, however, it is significantly lower than unmasked parental molecules. High dose IL-12 variants induce serum TNFα expression comparable to parental 3 days post treatment started.
[0858] PK: Fc capture, Fc detect: Fc detect PK ELISA indicate no difference in drug accumulation in plasma in B16 model. PK analysis was performed using Fc capture, Fc detect ELISA.

[0859] The results are shown in FIGS. 66-68.

### Example 12

[0860] The purpose of this study is to determine the safety, and compare pharmacokinetics and pharmacodynamic of exemplarily tumor-targeted molecules in cynomolgus monkeys.

[0861] Three GAG-binding mutation containing molecules were constructed with Truman Fc and human IL-12 with different cleavage sites, AK921, AK923, AK667 that has cleavage sites RAAAVKSP, ISSGLLSGRS and MPYDLYHP, respectively, were tested in this study. AK671, parental un-masked molecule with GAG-binding mutation is used as positive control, The structures of these molecules are shown in Example 8, and exact sequences in the sequence tables in Section 10.

[0862] Animals will be dosed by intravenous injection at 4 mL/kg on Days 0, 7, 14, and 21 at ˜1.0 mL/min for a total of 4 doses. Plasma will be collected at various time point (until Day56) for a full PK analysis.

[0863] PK analysis will be performed using Fc capture. Fc detect ELISA. Hematology, serum chemistry swill also be performed. FACS analysis will be performed at Day 0 (pre-dose), Day 5 and Day 12 for the following markers: CD3, CD4, CD8, CD16, CD25, CD45, CD127, CD278, CD159a, FoxfP3, and Ki67.

[0864] The results are shown in shows FIGS. 69-71.
[0865] PK: Measurements of test articles in plasma were made using Meso Scale Discovery (MSD®) technology that employed anti-human IgG as the capture reagent and anti-human IgG as the detection reagent. FIG. 69 showed thug level in plasmas front the first 7 days.
[0866] PD via flow cytometry: Flow cytometry analysis was performed on peripheral blood pre-dose and at various timepoints post dose for T and NK cell proliferation status. MFI of proliferation marker Ki-67 was accessed in NK cells and CD8 T cells and peak changes were observed on day 14 post first dose administration. Ki-67 NMI of unmask AK671 was significantly increased in both NK cells and CD8 T cells in blood, whereas masked molecules did not show significant peripheral NK or T cell activation. A one-way ANOVA Bonferonni's multiple comparison post-test was performed to determine the statistical significance of treatment vs Vehicle (*P<0.05; **P<0.01; ***P<0.001; ****P<0.0001). See results in FIG. 70
[0867] Hematology and Serum chemistry: Hematology and serum chemistry were performed on day 1 and day 5. (a) Transient decrease in absolute lymphocyte counts (day 1), RBC (day 8) and percentage of Hematocrit (HCT)(day 8) in blood was observed in all groups. All the observations were within normal range for both masked and unmasked molecules. (b) Unmasked AK671 increased serum ALT, AST and TBILI (biomarkers of liver function test), on Day 5 post first dose (not significant). Masked molecules of AK667, AK921 and AK923 show relatively lower levels of ALT, AST and TBILI in serum. See results in FIGS. 71A and 71B (arrows indicate time of dosing).

### 10. SEQUENCES

[0868] Cleavable Linkers:

| | | SEQ ID | | |
|---|---|---|---|---|
| Component | | NO | Sequence | DC |
| N terminal | | 16 | GGSGGS | AK380 |
| spacer domain | | | | AK434 |
| | | | | AK666 |
| | | | | AK667 |
| | | | | AK918 |
| | | | | AK920 |
| | | | | AK924 |
| | | | | AK669 |
| | | | | AK922 |
| | | 17 | GGSGGSGGS | AK381 |
| | | | | AK382 |
| | | | | AK383 |
| | | | | AK384 |
| | | | | AK386 |
| | | | | AK446 |
| | | | | AK447 |
| | | | | AK448 |
| | | | | AK528 |
| | | | | AK529 |
| | | | | AK604 |
| | | | | AK605 |
| | | | | AK606 |
| | | | | AK665 |
| | | | | AK668 |
| | | | | AK921 |
| | | | | AK925 |
| | | | | AK670 |
| | | | | AK923 |
| Peptide substrate | [VPLSLY] | 15 | VPL*SLY | AK380 |
| | | | (* indicates | AK381 |
| | | | cleavage site) | AK382 |
| | | | | AK383 |
| | | | | AK384 |
| | | | | AK386 |
| | | | | AK434 |
| | | | | AK446 |
| | | | | AK447 |
| | | | | AK448 |
| | | | | AK528 |
| | | | | AK529 |
| | | | | AK604 |
| | | | | AK605 |
| | | | | AK606 |
| | | | | AK666 |
| | | | | AK665 |
| | [MPYDLYHP] | 41 | MPYD*LYHP | AK667 |
| | | | (* indicates | AK668 |
| | | | cleavage site) | |
| | [DSGGFMLT] | 42 | DSGG*FMLT | AK918 |
| | | | (* indicates | AK919 |
| | | | cleavage site) | |
| | [RAAAVKSP] | 43 | RAAA*VKSP | AK920 |
| | | | (* indicates | AK924 |
| | | | cleavage site) | AK921 |
| | | | | AK925 |
| | [ISSGLLSGRS] | 44 | ISSGLL*SGRS | AK669 |
| | | | (* indicates | AK922 |
| | | | cleavage site) | AK670 |
| | | | | AK923 |
| | [DLLAVVAAS] | 45 | DLLA*VVAAS | |
| | | | (* indicates | |
| | | | cleavage site) | |
| C terminal | | 18 | SGP | |
| spacer domain | | | | AK381 |
| | | | | AK382 |
| | | | | AK383 |
| | | | | AK384 |
| | | | | AK386 |
| | | | | AK434 |
| | | | | AK446 |
| | | | | AK447 |
| | | | | AK448 |
| | | | | AK528 |
| | | | | AK529 |
| | | | | AK604 |
| | | | | AK605 |
| | | | | AK606 |
| | | | | AK666 |
| | | | | AK667 |
| | | | | AK918 |
| | | | | AK920 |
| | | | | AK924 |
| | | | | AK669 |
| | | | | AK922 |
| | | | | AK665 |
| | | | | AK668 |
| | | | | AK919 |
| | | | | AK921 |
| | | | | AK925 |
| | | | | AK670 |
| | | | | AK923 |
| Cleavable | | 19 | GGSGGSVPLSLYSGP | AK380 |
| linker (L2) | | | | AK434 |
| | | | | AK666 |
| | | 20 | GGSGGSGGSVPLSLYSGP | AK381 |
| | | | | AK382 |
| | | | | AK383 |
| | | | | AK384 |
| | | | | AK386 |
| | | | | AK446 |
| | | | | AK447 |
| | | | | AK448 |
| | | | | AK604 |
| | | | | AK605 |
| | | | | AK606 |
| | | | | AK665 |
| | | 46 | GGSGGSMPYDLYHPSGP | AK667 |
| | | 47 | GGSGGSGDSMPYDLYHPSGP | AK668 |
| | | 48 | GGSGGSDSDGFMLTSGP | AK918 |
| | | 49 | GGSGGSGGSDSGGFMLTSGP | AK919 |
| | | 50 | GGSGGSRAAAVKSPSGP | AK920 |
| | | | | AK924 |
| | | 51 | GGSGGSGGSRAAAVKSPSGP | AK921 |
| | | | | AK925 |
| | | 52 | GGSGGSISSGLLSGRSSGP | AK669 |
| | | | | AK922 |
| | | 53 | GGSGGSGGSISSGLLSGRSSGP | AK670 |
| | | | | AK923 |

| | SEQ | | |
|---|---|---|---|
| | ID | | |
| Component Name | NO | Sequence | DC |
| Non-cleavable linker | 12 | GGGGS | AK448 |
| (L1) | | | |
| | 13 | GGGGSGG | AK380 |
| | | GGS | AK381 |
| | | | AK382 |
| | | | AK383 |
| | | | AK384 |
| | | | AK386 |
| | | | AK434 |
| | | | AK446 |
| | | | AK528 |
| | | | AK529 |
| | | | AK604 |
| | | | AK605 |
| | | | AK606 |
| | | | AK663 |
| | 14 | GGSGGGSG | AK447 |
| | | | AK598 |
| | | | AK600 |
| | | | AK601 |
| | | | AK924 |
| | | | AK922 |
| | | | AK925 |
| | | | AK923 |
| | 54 | GGSGGSGG | AK598 |
| | | SGGSGGSS | AK600 |
| | | GP | AK601 |
| | | | AK664 |
| | | | AK671 |
| | 55 | PGGSGP | AK666 |
| | | | AK667 |
| | 56 | GGSPG | AK918 |
| | | | AK920 |
| | | | AK669 |
| | | | AK665 |
| | | | AK668 |
| | | | AK919 |
| | | | AK921 |
| | | | AK670 |
| | | | AK664 |

| | | SEQ | | |
|---|---|---|---|---|
| | | ID | | |
| Component | | NO | Sequence | Molecule |
| hIL12B | IL-12 | 1 | IWELKKDVYVVELDW | AK380 |
| | p40 | | YPDAPGEMVVLTCDT | AK381 |
| | subunit | | PEEDGITWTLDQSSE | AK382 |
| | | | VLGSGKTLTIQVKEF | AK383 |
| | | | GDAGQYTCHKGGEVL | AK384 |
| | | | SHSLLLLHKKEDGIW | AK386 |
| | | | STDILKDQKEPKNKT | AK434 |
| | | | FLRCEAKNYSGRFTC | AK446 |
| | | | WWLTTISTDLTFSVK | AK447 |
| | | | SSRGSSDPQGVTCGA | AK448 |
| | | | ATLSAERVRGDNKEY | AK528 |
| | | | EYSVECQEDSACPAA | AK529 |
| | | | EESLPIEVMVDAVHK | AK598 |
| | | | LKYENYTSSFFIRDI | AK604 |
| | | | 1KPDPPKNLQLKPLK | |
| | | | NSRQVEVSWEYPDTW | |
| | | | STPHSYFSLTFCVQV | |
| | | | QGKSKREKKDRVFTD | |
| | | | KTSATVICRKNASIS | |
| | | | VRAQDRYYSSSWSEW | |
| | | | ASVPCS | |
| | IL-12 | 57 | IWELKKDVYVVELDW | AK601 |
| | p40 | | YPDAPGEMVVLTCDT | |
| | subunit | | PEEDGITWTLDQSSE | |
| | [KDNT | | VLGSGKTLTIQVKEF | |
| | EGRV] | | GDAGQYTCHKGGEVL | |
| | | | SHSLLLLHKKEDGIW | |
| | | | STDILKDQKEPKNKT | |
| | | | FLRCEAKNYSGRFTC | |
| | | | WWLTTISTDLTFSVK | |
| | | | SSRGSSDPQGVTCGA | |
| | | | ATLSAERVRGDNKEY | |
| | | | EYSVECQEDSACPAA | |
| | | | EESLPIEVMVDAVHK | |
| | | | LKYENYTSSFFIRDI | |
| | | | IKPDPPKNLQLKPLK | |
| | | | NSRQVEVSWEYPDTW | |
| | | | STPHSYFSLTFCVQV | |
| | | | QGKDNTERVFTDKTS | |
| | | | ATVICRKNASISVRA | |
| | | | QDRYYSSSWSEWASV | |
| | | | PCS | |
| | IL-12 | 58 | IWELKKDVYVVELDW | AK600 |
| | p40 | | YPDAPGEMVVLTCDT | |
| | subunit | | PEEDGITWTLDQSSE | |
| | [KDNT | | VLGSGKTLTIQVKEF | |
| | ERV] | | GDAGQYTCHKGGEVL | |
| | | | SHSLLLLHKKEDGIW | |
| | | | STDILKDQKEPKNKT | |
| | | | FLRCEAKNYSGRFTC | |
| | | | WWLTTISTDLTFSVK | |
| | | | SSRGSSDPQGVTCGA | |
| | | | ATLSAERVRGDNKEY | |
| | | | EYSVECQEDSACPAA | |
| | | | EESLPIEVMVDAVHK | |
| | | | LKYENYTSSFFIRDI | |
| | | | IKPDPPKNLQLKPLK | |
| | | | NSRQVEVSWEYPDTW | |
| | | | STPHSYFSLTFCVQV | |
| | | | QGKDNTEGRVFTDKT | |
| | | | SATVICRKNASISVR | |
| | | | AQDRYYSSSWSEWAS | |
| | | | VPCS | |
| | IL-12 | 59 | IWELKKDVYWELDWY | AK605 |
| | p40 | | PDAPGEMVVLTCDTP | AK606 |
| | subunit | | EEDGITWTLDQSSEV | |
| | [C252S] | | LGSGKTLTIQVKEFG | |
| | | | DAGQYTCHKGGEVLS | |
| | | | HSLLLLHKKEDGIWS | |
| | | | TDILKDQKEPKNKTF | |
| | | | LRCEAKNYSGRFTCW | |
| | | | WLTTISTDLTFSVKS | |
| | | | SRGSSDPQGVTCGAA | |
| | | | TLSAERVRGDNKEYE | |
| | | | YSVECQEDSACPAAE | |
| | | | ESLPIEVMVDAVHKL | |
| | | | KYENYTSSFFIRDII | |
| | | | KPDPPKNLQLKPLKN | |
| | | | SRQVEVSWEYPDTWS | |
| | | | TPHSYFSLTFSVQVQ | |
| | | | GKSKREKKDRVFTDK | |
| | | | TSATVICRKNASISV | |
| | | | RAQDRYYSSSWSEWA | |
| | | | SVPCS | |
| | p40 | 60 | IWELKKDVYVVELDW | AK666 |
| | subunit | | YPDAPGEMVVLTCDT | AK667 |
| | [KDNT | | PEEDGITWTLDQSSE | AK918 |
| | EGRV] + | | VLGSGKTLTIQVKEF | AK920 |
| | [C252S] | | GDAGQYTCHKGGEVL | AK924 |
| | | | SHSLLLLHKKEDGIW | AK669 |
| | | | STDILKDQKEPKNKT | AK922 |
| | | | FLRCEAKNYSGRFTC | AK665 |
| | | | WWLTTISTDLTFSVK | AK668 |
| | | | SSRGSSDPQGVTCGA | AK919 |
| | | | ATLSAERVRGDNKEY | AK921 |
| | | | EYSVECQEDSACPAA | AK925 |
| | | | EESLPIEVMVDAVHK | AK670 |
| | | | LKYENYTSSFFIRDI | AK923 |
| | | | IKPDPPKNLQLKPLK | AK671 |
| | | | NSRQVEVSWEYPDTW | AK664 |
| | | | STPHSYFSLTFSVQV | |
| | | | QGKDNTEGRVFTDKT | |
| | | | SATVICRKNASISVR | |
| | | | AQDRYYSSSWSEWAS | |
| | | | VPCS | |
| Linker | | 3 | GGGGSGGGGSGGGGS | AK380 |
| | | | | AK381 |
| | | | | AK382 |
| | | | | AK383 |
| | | | | AK384 |
| | | | | AK386 |
| | | | | AK434 |
| | | | | AK446 |
| | | | | AK447 |
| | | | | AK448 |
| | | | | AK528 |
| | | | | AK529 |
| | | | | AK598 |
| | | | | AK600 |
| | | | | AK601 |
| | | | | AK604 |
| | | | | AK605 |
| | | | | AK606 |
| | | | | AK666 |
| | | | | AK667 |
| | | | | AK918 |
| | | | | AK920 |
| | | | | AK924 |
| | | | | AK669 |
| | | | | AK922 |
| | | | | AK665 |
| | | | | AK668 |
| | | | | AK919 |
| | | | | AK921 |
| | | | | AK925 |
| | | | | AK670 |
| | | | | AK923 |
| | | | | AK671 |
| | | | | AK664 |
| | | | | AK944 |
| | | | | AK945 |
| | | | | AK947 |
| | | | | AK948 |
| hIL12A | IL-12 | 2 | RNLPVATPDPGMFPC | AK380 |
| | p35 | | LHHSQNLLRAVSNML | AK381 |
| | subunit | | QKARQTLEFYPCTSE | AK382 |
| | | | EIDHEDITKDKTSTV | AK383 |
| | | | EACLPLELTKNESCL | AK384 |
| | | | NSRETSFITNGSCLA | AK386 |
| | | | SRKTSFMMALCLSSI | AK434 |
| | | | YEDLKMYQVEFKTMN | AK446 |
| | | | AKLLMDPKRQIFLDQ | AK447 |
| | | | NMLAVIDELMQALNF | AK448 |
| | | | NSETVPQKSSLEEPD | AK528 |
| | | | FYKTKIKLCILLHAF | AK529 |
| | | | RIRAVTIDRVMSYLN | AK598 |
| | | | AS | AK600 |
| | | | | AK601 |
| | | | | AK604 |
| | | | | AK605 |
| | | | | AK606 |
| | | | | AK666 |
| | | | | AK667 |
| | | | | AK918 |
| | | | | AK920 |
| | | | | AK924 |
| | | | | AK669 |
| | | | | AK922 |
| | | | | AK665 |
| | | | | AK668 |
| | | | | AK919 |
| | | | | AK921 |
| | | | | AK925 |
| | | | | AK670 |
| | | | | AK923 |
| | | | | AK671 |
| | | | | AK664 |
| Cytokine | hIL12B- | 4 | IWELKKDVYVVELDW | AK380 |
| domain | hIL12A | | YPDAPGEMVVLTCDT | AK381 |
| | | | PEEDGITWTLDQSSE | AK382 |
| | | | VLGSGKTLTIQVKEF | AK383 |
| | | | GDAGQYTCHKGGEVL | AK384 |
| | | | SHSLLLLHKKEDGIW | AK386 |
| | | | STDILKDQKEPKNKT | AK434 |
| | | | FLRCEAKNYSGRFTC | AK446 |
| | | | WWLTTISTDLTFSVK | AK447 |
| | | | SSRGSSDPQGVTCGA | AK448 |
| | | | ATLSAERVRGDNKEY | AK528 |
| | | | EYSVECQEDSACPAA | AK529 |
| | | | EESLPIEVMVDAVHK | AK598 |
| | | | LKYENYTSSFFIRDI | AK604 |
| | | | IKPDPPKNLQLKPLK | |
| | | | NSRQVEVSWEYPDTW | |
| | | | STPHSYFSLTFCVQV | |
| | | | QGKSKREKKDRVFTD | |
| | | | KTSATVICRKNASIS | |
| | | | VRAQDRYYSSSWSEW | |
| | | | ASVPCSGGGGSGGGG | |
| | | | SGGGGSRNLPVATPD | |
| | | | PGMFPCLHHSQNLLR | |
| | | | AVSNMLQKARQTLEF | |
| | | | YPCTSEEIDHEDITK | |
| | | | DKTSTVEACLPLELT | |
| | | | KNESCLNSRETSFIT | |
| | | | NGSCLASRKTSFMMA | |
| | | | LCLSSIYEDLKMYQV | |
| | | | EFKTMNAKLLMDPKR | |
| | | | QIFLDQNMLAVIDEL | |
| | | | MQALNFNSETVPQKS | |
| | | | SLEEPDFYKTKIKLC | |
| | | | ILLHAFRIRAVTIDR | |
| | | | VMSYLNAS | |
| | hIL12B- | 61 | IWELKKDVYVVELDW | AK601 |
| | hIL12A | | YPDAPGEMVVLTCDT | |
| | [KDNT | | PEEDGITWTLDQSSE | |
| | ERV] | | VLQSGKTLTIQVKEF | |
| | | | GDAGQYTCHKGGEVL | |
| | | | SHSLLLLHKKEDGIW | |
| | | | STDILKDQKEPKNKT | |
| | | | FLRCEAKNYSGRFTC | |
| | | | WWLTTISTDLTFSVK | |
| | | | SSRGSSDPQGVTCGA | |
| | | | ATLSAERVRGDNKEY | |
| | | | EYSVECQEDSACPAA | |
| | | | EESLPIEVMVDAVI4 | |
| | | | KLKYENYTSSFFIRD | |
| | | | IIKTDPPKNLQLKPL | |
| | | | KNSRQVEVSWEYPDT | |
| | | | WSTPHSYFSLCVQVQ | |
| | | | GKDNTERVFTDKTSA | |
| | | | TVICRKNASISVRAQ | |
| | | | DRYYSSSWSEWASVP | |
| | | | CSGGGGSGGGGSGGG | |
| | | | GSRNLPVATPDPGMF | |
| | | | PCLHHSQNLLRAVSN | |
| | | | MLQKARQTLEFYPCT | |
| | | | SEEIDHEDITKDKTS | |
| | | | TVEACLPLELTKNES | |
| | | | CLNSRETSFITNGSC | |
| | | | LASRKTSFMMALCLS | |
| | | | SIYEDLKMYQVEFKT | |
| | | | MNAKLLMDPKRQIFL | |
| | | | DQNMLAVIDELMQAL | |
| | | | NFNSETVPQKSSLEE | |
| | | | PDFYKTKIKLCILLH | |
| | | | AFRIRAVTIDRVMSY | |
| | | | LNAS | |
| | hIL12B- | 62 | IWELKKDVYVVELDW | AK600 |
| | hIL12A | | YPDAPGEMVVLTCDT | |
| | [KDNT | | PEEDGITWTLDQSSE | |
| | EGRV) | | VLGSGKTLTIQVKEF | |
| | | | GDAGQYTCHKGGEVL | |
| | | | SHSLLLLHKKEDGIW | |
| | | | STDILKDQKEPKNKT | |
| | | | FLRCEAKNYSGRFTC | |
| | | | WWLTTISTDLTFSVK | |
| | | | SSRGSSDPQGVTCGA | |
| | | | ATLSAERVRGDNKEY | |
| | | | EYSVECQEDSACPAA | |
| | | | EESLPIEVMVDAVHK | |
| | | | LKYENYTSSFFIRDI | |
| | | | IKPDPPKNLQLKPLK | |
| | | | NSRQVEVSWEYPDTW | |
| | | | STPHSYFSLTFCVQV | |
| | | | QGKDNTEGRVFTDKT | |
| | | | SATVICRKNASISVR | |
| | | | AQDRYYSSSWSEWAS | |
| | | | VPCSGGGGSGGGGSG | |
| | | | GGGSRNLPVATPDPG | |
| | | | MFPCLHHSQNLLRAV | |
| | | | SNMLQKARQTLEFYP | |
| | | | CTSEEIDHEDITKDK | |
| | | | TSTVEACLPLELTKN | |
| | | | ESCLNSRETSFITNG | |
| | | | SCLASRKTSFMMALC | |
| | | | LSSIYEDLKMYQVEF | |
| | | | KTMNAKLLMDPKRQI | |
| | | | FLDQNMLAVIDELMQ | |
| | | | ALNFNSETVPQKSSL | |
| | | | EEPDFYKTKIKLCIL | |
| | | | LHAFRIRAVTIDRVM | |
| | | | SYLNAS | |
| | hIL12B- | 63 | IWELKKDVYVVELDW | AK605 |
| | hIL12A | | YPDAPGEMVVLTCDT | AK606 |
| | [C252S] | | PEEDGITWTLDQSSE | |
| | | | VLGSGKTLTIQVKEF | |
| | | | GDAGQYTCHKGGEVL | |
| | | | SHSLLLLHKKEDGIW | |
| | | | STDILKDQKEPKNKT | |
| | | | FLRCEAKNYSGRFTC | |
| | | | WWLTTISTDLTFSVK | |
| | | | SSRGSSDPQGVTCGA | |
| | | | ATLSAERVRGDNKEY | |
| | | | EYSVECQEDSACPAA | |
| | | | EESLPIEVMVDAVHK | |
| | | | LKYENYTSSFFIRDI | |
| | | | IKPDPPKNLQLKPLK | |
| | | | NSRQVEVSWEYPDTW | |
| | | | STPHSYFSLTFSVQV | |
| | | | QGKSKREKKDRVFTD | |
| | | | KTSATVTCRKNASI | |
| | | | SVRAQDRYYSSSWSE | |
| | | | WASVPCSGGGGSGGG | |
| | | | GSGGGGSRNLPVATP | |
| | | | DPGMFPCLHHSQNLL | |
| | | | RAVSNMLQKARQTLE | |
| | | | FYPCTSEEIDHEDIT | |
| | | | KDKTSTVEACLPLEL | |
| | | | TKNESCLNSRETSFI | |
| | | | TNGSCLASRKTSFMM | |
| | | | ALCLSSIYEDLKMYQ | |
| | | | VEFKTMNAKLLMDPK | |
| | | | RQIFLDQNMLAVIDE | |
| | | | LMQALNFNSETVPQK | |
| | | | SSLEEPDFYKTKIKL | |
| | | | CILLHAFRIRAVTID | |
| | | | RVMSYLNAS | |
| | hIL12B- | 64 | IWELKKDVYVVELDW | AK666 |
| | hIL12A | | YPDAPGEMVVLTCDT | AK667 |
| | [KDNT | | PEEDGITWTLDQSSE | AK918 |
| | EGRV) | | VLGSGKTLTIQVKEF | AK920 |
| | + | | GDAGQYTCHKGGEVL | AK924 |
| | [C252S) | | SHSLLLLHKKEDGIW | AK669 |
| | | | STDILKDQKEPKNKT | AK922 |
| | | | FLRCEAKNYSQRFTC | AK665 |
| | | | WWLTTISTDLTFSVK | AK668 |
| | | | SSRGSSDPQGVTCGA | AK919 |
| | | | ATLSAERVRGDNKEY | AK921 |
| | | | EYSVECQEDSACPAA | AK925 |
| | | | EESLPIEVMVDAVHK | AK670 |
| | | | LKYENYTSSFFIRDI | AK923 |
| | | | IKPDPPKNLQLKPLK | AK671 |
| | | | NSRQVEVSWEYPDTW | AK664 |
| | | | STPHSYFSLTFSVQV | |
| | | | QGKDNTEGRVFTDKT | |
| | | | SATVICRKNASISVR | |
| | | | AQDRYYSSSWSEWAS | |
| | | | VPCSGGGGSGGGGSG | |
| | | | GGGSRNLPVATPDPG | |
| | | | MFPCLHHSQNLLRAV | |
| | | | SNMLQKARQTLEFYP | |
| | | | CTSEEIDHEDITKDK | |
| | | | TSTVEACLPLELTKN | |
| | | | ESCLNSRETSFITNG | |
| | | | SCLASRKTSFMMALC | |
| | | | LSSIYEDLKMYQVEF | |
| | | | KTMNAKLLMDPKRQI | |
| | | | FLDQNMLAVIDELMQ | |
| | | | ALNFNSETVPQKSSL | |
| | | | EEPDFYKTKIKLCIL | |
| | | | LHAFRIRAVTIDRVM | |
| | | | SYLNAS | |

| | | SEQ | | |
|---|---|---|---|---|
| | | ID | | |
| Component | | NO | Sequence | DC |
| Maskin | hCD212 | 5 | CRTSECCFQDPPYPD | AK384 |
| 8 | (24-237) | | ADSGSASGPRDLRCY | |
| moiety | | | RISSDRYECSWQYEG | |
| (MM) | | | PTAGVSHFLRCCLSS | |
| | | | GRCCYFAAGSATRLQ | |
| | | | FSDQAGVSVLYTVTL | |
| | | | WVESWARNQTEKSPE | |
| | | | VTLQLYNSVKYEPPL | |
| | | | GDIKVSKLAGQLRME | |
| | | | WETPDNQVGAEVQFR | |
| | | | HRTPSSPWKLGDCGP | |
| | | | QDDDTESCLCPLEMN | |
| | | | VAQEFQLRRRQLGSQ | |
| | | | GSSWSKWSSPVCVPP | |
| | | | ENP | |
| | hCD212 | 6 | CRTSECCFQDPPYPD | AK380 |
| | (24-545) | | ADSGSASGPRDLRCY | AK381 |
| | | | RISSDRYECSWQYEG | AK382 |
| | | | PTAGVSHFLRCCLSS | |
| | | | GRCCYFAAGSATRLQ | |
| | | | FSDQAGVSVLYTVTL | |
| | | | WVESWARNQTEKSPE | |
| | | | VTLQLYNSVKYEPPL | |
| | | | GDIKVSKLAGQLRME | |
| | | | WETPDNQVGAEVQFR | |
| | | | HRTPSSPWKLGDCGP | |
| | | | QDDDTESCLCPLEMN | |
| | | | VAQEFQLRRRQLGSQ | |
| | | | GSSWSKWSSPVCVPP | |
| | | | ENPPQPQVRFSVEQL | |
| | | | GQDGRRRLTLKEQPT | |
| | | | QLELPEGCQGLAPGT | |
| | | | EVTYRLQLHMLSCPC | |
| | | | KAKATRTLHLGKMPY | |
| | | | LSGAAYNVAVISSNQ | |
| | | | FGPGLNQTWHIPADT | |
| | | | HTEPVALNISVGTNG | |
| | | | TTMYWPARAQSMTYC | |
| | | | IEWQPVGQDGGLATC | |
| | | | SLTAPQDPDPAGMAT | |
| | | | YSWSRESGAMGQEKC | |
| | | | YYITIFASAHPEKLT | |
| | | | LWSTVLSTYHFGGNA | |
| | | | SAAGTPHHVSVKNHS | |
| | | | LDSVSVDWAPSLLST | |
| | | | CPGVLKEYVVRCRDE | |
| | | | DSKQVSEHPVQPTET | |
| | | | QVTLSGLRAGVAYTV | |
| | | | QVRADTAWLRGVWSQ | |
| | | | PQRFSIEVQVSD | |
| | ILI2RB2 | 7 | KIDACKRGDVTVKPS | AK528 |
| | (24-222) | | HVILLOSTVNITCSL | |
| | | | KPRQGCFHYSRRNKL | |
| | | | ILYKFDRRINFHHGI | |
| | | | ISLNSQVTGLPLGTT | |
| | | | LFVCKLACINSDEIQ | |
| | | | ICGAEIFVGVAPEQP | |
| | | | QNLSCIQKGEQGTVA | |
| | | | CTWERORDTHLYTEY | |
| | | | TLQLSGPKNLIWQKQ | |
| | | | CKDIYCDYLDFGINI | |
| | | | TPESPESNITAKVIW | |
| | | | NSLGSSSSL | |
| | ILI2RB2 | 8 | KIDACKRGDVTVKPS | AK446 |
| | (24-222) | | HVILLGSTVNITCSL | |
| | | | KPRQGCFHYSRRNKL | |
| | | | ILYKFDRRINFHHGH | |
| | | | SLNSQVTGLPLGITL | |
| | | | FVCKLACINSDEIQI | |
| | | | CGAEIFVGVAPEQPQ | |
| | | | NLSCIQKGEQGTVAC | |
| | | | TWERGRDTHLYTEYT | |
| | | | LQLSGPKNLTWQKQC | |
| | | | KDIYCDYLDFGINLT | |
| | | | PESPESNFTAKVTAV | |
| | | | NSLGSSSSLPSTFTF | |
| | | | LDIV | |
| | ILI2RB2 | 9 | KIDACKRGDVTVKPS | AK386 |
| | (24-319) | | HVILLGSTVNITCSL | AK434 |
| | | | KPRQGCFHYSRRNKL | AK447 |
| | | | ILYKFDRRINFHHGH | AK448 |
| | | | SLERGRDTHLYTEYT | AK598 |
| | | | LQLSGPKNLTWQKQC | AK600 |
| | | | KDIYCDYLDFGINLT | AK601 |
| | | | PESPESNFTAKVTAV | AK605 |
| | | | NSLGSSSSLPSIFTF | |
| | | | LDIVRPLPPWDIRIK | |
| | | | FQKASVSRCTLYWRD | |
| | | | EGLVLLNRLRYRPSN | |
| | | | SRLWNMVNVTKAKGR | |
| | | | HDLLDLKPFTEYEFQ | |
| | | | ISSKLHLYKGSWSDW | |
| | | | SESLRAQTPEE | |
| | IL12RB2 | 65 | KIDACKRGDVTVKPS | AK604 |
| | (24-319) | | HVILLGSTVNITCSL | AK606 |
| | [C242S] | | KPRQGCFHYSRRNKL | AK666 |
| | | | ILYKFDRRINFHHGH | AK667 |
| | | | SLNSQVTGLPLGTTL | AK918 |
| | | | FVCKLACINSDEIQI | AK920 |
| | | | CGAEIFVGVAPEQPQ | AK924 |
| | | | NLSCIQKGEQGTVAC | AK669 |
| | | | TWERGRDTHLYTEYT | AK922 |
| | | | LQLSGPKNLTWQKQC | AK665 |
| | | | KDIYCDYLDFGINLT | AK668 |
| | | | PESPESNFTAKVTAV | AK919 |
| | | | NSLGSSSSLPSTFTF | AK921 |
| | | | LDIVRPLPPWDIRIK | AK925 |
| | | | FQKASVSRSTLYWRD | AK670 |
| | | | EGLVLLNRLRYRPSN | AK923 |
| | | | SRLWNMVNVTKAKGR | AK663 |
| | | | HDLLDLKPFTEYEFQ | AK664 |
| | | | ISSKLHLYKGSWSDW | |
| | | | SESLRAQTPEENSQV | |
| | | | TGLPLGTTLFVCKLA | |
| | | | CINSDEIQICGAEIF | |
| | | | VGVAPEQPQNLSCIQ | |
| | | | KGEQGTVACTW | |
| | ILI2RB2 | 10 | KIDACKRGDVTVKPS | AK383 |
| | (24-622) | | HVILLOSTVNITCSL | |
| | | | KPRQGCFHYSRRNKL | |
| | | | ILYKFDRRINFHHGH | |
| | | | SLNSQVTGLPLGTTL | |
| | | | FVCKLACINSDEIQI | |
| | | | CGAEIFVGVAPEQPQ | |
| | | | NLSCIQKGEQGTVAC | |
| | | | TWERGRDTHLYTEYT | |
| | | | LQLSGPKNLTWQKQC | |
| | | | KDIYCDYLDFGINLT | |
| | | | PESPESNFTAKVTAV | |
| | | | NSLGSSSSLPSTFIF | |
| | | | LDIVRPLPPWDIRIK | |
| | | | FQKASVSRCTLYWRD | |
| | | | EGLVLLNRLRYRPSN | |
| | | | SRLWNMVNVTKAKGR | |
| | | | HDLLDLKPFTEYEFQ | |
| | | | ISSKLHLYKGSWSDW | |
| | | | SESLRAQTPEEEPTG | |
| | | | MLDVWYMKRHIDYSR | |
| | | | QQISLFWKNLSVSEA | |
| | | | RGKILHYQVILQELT | |
| | | | GGKAMTQNITGHTSW | |
| | | | TTVIPRTGNWAVAVS | |
| | | | AANSKGSSLPTRINI | |
| | | | MNLCEAGLLAPRQVS | |
| | | | ANSEGMDNILVTWQP | |
| | | | PRKDPSAVQEYVVEW | |
| | | | RELHPGGDTQVPLNW | |
| | | | LRSRPYNVSALISEN | |
| | | | IKSYICYEIRVYALS | |
| | | | GDQGGCSSILGNSKH | |
| | | | KAPLSGPHINAITEE | |
| | | | KGSILISWNSIPVQE | |
| | | | QMGCLLHYRIYWKER | |
| | | | DSNSQPQLCEIPYRV | |
| | | | SQNSHPINSLQPRVT | |
| | | | YVLWMTALTAAGESS | |
| | | | HGNEREFCLQGKAN | |
| | IL12RB2 | 11 | KIDACKRGDVTVKPS | AK529 |
| | (24-227) | | HVILLGSTVNITCSL | |
| | | | KPRQGCFHYSRRNKL | |
| | | | ILYKFDRRINFHHGH | |
| | | | SLNSQVTGLPLGTTL | |
| | | | FVCKLACINSDEIQI | |
| | | | CGAEIFVGVAPEQPQ | |
| | | | NLSCIQKGEQGTVAC | |
| | | | TWERGRDTHLYTEYT | |
| | | | LQLSGPKNLTWQKQC | |
| | | | KDIYCDYLDFGINLT | |
| | | | PESPESNFTAKVTAV | |
| | | | NSLGSSSSLPSTFTF | |
| | | | LDIVRPLPP | |

[0869] Half-life extension domains:

| | | SEQ | | |
|---|---|---|---|---|
| | | ID | | |
| Component | | NO | Sequence | DC |
| 1st Half | Hole: | 25 | DKTHTCPPCPAPELL | AK380 |
| life | hFc(297A) | | GGPSVFLFPPKPKDT | AK381 |
| extension | | | LMISRTPEVTCVVVD | AK382 |
| domain | | | VSHEDPEVKFNWYVD | AK383 |
| (HL1) | | | GVEVHNAKTKPREEQ | AK384 |
| | | | YASTYRVVSVLTVLH | AK386 |
| | | | QDWLNGKEYKCKVSN | AK434 |
| | | | KALPAPIEKTISKAK | AK446 |
| | | | GQPREPQVCTLPPSR | AK447 |
| | | | DELTKNQVSLSCAVK | AK448 |
| | | | GFYPSDIAVEWESNG | AK528 |
| | | | QPENNYKTTPPVLDS | AK529 |
| | | | DGSFFLVSKLTVDKS | AK598 |
| | | | RWQQGNVFSCSVMHE | AK600 |
| | | | ALHNHYTQKSLSLSP | AK601 |
| | | | G | AK604 |
| | | | | AK605 |
| | | | | AK606 |
| | | | | AK666 |
| | | | | AK667 |
| | | | | AK918 |
| | | | | AK920 |
| | | | | AK924 |
| | | | | AK669 |
| | | | | AK922 |
| | | | | AK665 |
| | | | | AK668 |
| | | | | AK919 |
| | | | | AK921 |
| | | | | AK925 |
| | | | | AK670 |
| | | | | AK923 |
| | | | | AK671 |
| | | | | AK663 |
| | | | | AK664 |
| 2nd Half | Knob: | 26 | DKTHTCPPCPAPELL | AK380 |
| life | hFc(297A) | | GGPSVFLFPPKPKDT | |
| extension | | | LMISRTPEVTCVVVD | |
| domain | | | VSHEDPEVKFNWYVD | AK381 |
| (HL2) | | | GVEVHNAKTKPREEQ | AK382 |
| | | | YASTYRVVSVLTVLH | AK383 |
| | | | QDWLNGKEYKCKVSN | AK384 |
| | | | KALPAPIEKTISKAK | AK386 |
| | | | GQPREPQVYTLPPCR | AK434 |
| | | | DELTKNQVSLWCLVK | AK446 |
| | | | GFYPSDIAVEWESNG | AK447 |
| | | | QPENNYKTTPPVLDS | AK448 |
| | | | DGSFFLYSKLTVDKS | AK528 |
| | | | RWQQGNVFSCSVMHE | AK529 |
| | | | ALHNHYTQKSLSLSP | AK598 |
| | | | G | AK600 |
| | | | | AK601 |
| | | | | AK604 |
| | | | | AK605 |
| | | | | AK606 |
| | | | | AK666 |
| | | | | AK667 |
| | | | | AK918 |
| | | | | AK920 |
| | | | | AK924 |
| | | | | AK669 |
| | | | | AK922 |
| | | | | AK665 |
| | | | | AK668 |
| | | | | AK919 |
| | | | | AK921 |
| | | | | AK925 |
| | | | | AK670 |
| | | | | AK923 |
| | | | | AK671 |
| | | | | AK663 |
| | | | | AK664 |
| Human | | 21 | ASTKGPSVFPLAPSS | |
| IgG1 | | | KSTSGGTAALGCLVK | |
| heavy | | | DYFPEPVTVSWNSGA | |
| chain | | | LTSGVHTFPAVLQSS | |
| constant | | | GLYSLSSVVTVPSSS | |
| gamma | | | LGTQTYICNVNHKPS | |
| 1 | | | NTKVDKKVEPKSCDK | |
| | | | THTCPPCPAPELLGG | |
| | | | PSVFLFPPKPKDTLM | |
| | | | ISRTPEVTCVVVDVS | |
| | | | HEDPEVKFNWYVDGV | |
| | | | EVHNAKTKPREEQYN | |
| | | | STYRVVSVLTVLHQD | |
| | | | WLNGKEYKCKVSNKA | |
| | | | LPAPIEKTISKAKGQ | |
| | | | PREPQVYTLPPSRDE | |
| | | | LTKNQVSLTCLVKGF | |
| | | | YPSDIAVEWESNGQP | |
| | | | ENNYKTTPPVLDSDG | |
| | | | SFFLYSKLTVDKSRW | |
| | | | QQGNVFSCSVMHEAL | |
| | | | HNHYTQKSLSLSPGK | |
| Human | | 22 | DKTHTCPPCPAPELL | |
| IgG1 | | | GGPSVFLFPPKPKDT | |
| heavy | | | LMISRTPEVTCVVVD | |
| chain | | | VSHEDPEVKFNWYVD | |
| constant | | | GVEVHNAKTKPREEQ | |
| gamma | | | YNSTYRVVSVLTVLH | |
| 1 | | | QDWLNGKEYKCKVSN | |
| Fc | | | KALPAPIEKTISKAK | |
| domain | | | GQPREPQVYTLPPSR | |
| | | | DELTKNQVSLTCLVK | |
| | | | GFYPSDIAVEWESNG | |
| | | | QPENNYKTTPPVLDS | |
| | | | DGSFFLYSKLTVDKS | |
| | | | RWQQGNVFSCSVMHE | |
| | | | ALHNHYTQKSLSLSP | |
| | | | G | |
| Human | | 23 | DKTHTCPPCPAPELL | |
| IgG1 | | | GGPSVFLFPPKPKDT | |
| heavy | | | LMISRTPEVTCVVVD | |
| chain | | | VSHEDPEVKFNWYVD | |
| constant | | | GVEVHNAKTKPREEQ | |
| gamma | | | YNSTYRVVSVLTVLH | |
| 1 | | | QDWLNGKEYKCKVSN | |
| Fc | | | KALPAPIEKTISKAK | |
| domain | | | GQPREPQVCTLPPSR | |
| (Y349C; | | | DELTKNQVSLSCAVK | |
| T366S; | | | GFYPSDIAVEWESNG | |
| L38A; | | | QPENNYKTTPPVLDS | |
| and | | | DGSFFLVSKLTVDKS | |
| Y407V) | | | RWQQGNVFSCSVMHE | |
| | | | ALHNHYTQKSLSLSP | |
| | | | G | |
| Human | | 24 | DKTHTCPPCPAPELL | |
| IgG1 | | | GGPSVFLFPPKPKDT | |
| heavy | | | LMISRTPEVTCVVVD | |
| chain | | | VSHEDPEVKFNWYVD | |
| constant | | | GVEVHNAKTKPREEQ | |
| gamma | | | YNSTYRVVSVLTVLH | |
| 1 | | | QDWLNGKEYKCKVSN | |
| Fc | | | KALPAPIEKTISKAK | |
| domain | | | GQPREPQVYTLPPCR | |
| (S354C | | | DELTKNQVSLWCLVK | |
| and | | | GFYPSDIAVEWESNG | |
| T366W) | | | QPENNYKTTPPVLDS | |
| | | | DGSFFLYSKLTVDKS | |
| | | | RWQQGNVFSCSVMHE | |
| | | | ALHNHYTQKSLSLSP | |
| | | | G | |
| Human | | 27 | DKTHTCPPCPAPELL | |
| IgG1 | | | GGPSVFLFPPKPKDT | |
| heavy | | | LMASRTPEVTCVVVD | |
| chain | | | VSHEDPEVKFNWYVD | |
| constant | | | GVEVHNAKTKPREEQ | |
| gamma | | | YASTYRVVSVLTVLH | |
| 1 | | | QDWLNGKEYKCKVSN | |
| Fc | | | KALPAPIEKTISKAK | |
| domain | | | GQPREPQVCTLPPSR | |
| (Y349C: | | | DELTKNQVSLSCAVK | |
| T366S; | | | GFYPSDIAVEWESNG | |
| L38A; | | | QPENNYKTTPPVLDS | |
| Y407V, | | | DGSFFLVSKLTVDKS | |
| N297A | | | RWQQGNVFSCSVMHE | |
| and | | | ALHNHYTQKSISISP | |
| I253 | | | G | |
| A) | | | | |
| Human | | 28 | DKTHTCPPCPAPELL | |
| IgG | | | GGPSVFLFPPKPKDT | |
| 1 | | | LMASRTPEVTCVVVD | |
| heavy | | | VSHEDPEVKFNWYVD | |
| chain | | | GVEVHNAKTKPREEQ | |
| constant | | | YASTYRVVSVLTVLH | |
| gamma | | | QDWLNGKEYKCKVSN | |
| 1 | | | KALPAPIEKTISKAK | |
| Fc | | | GQPREPQVYTLPPCR | |
| domain | | | DELTKNQVSLWCLVK | |
| (S354C, | | | GFYPSDIAVEWESNG | |
| T366W, | | | QPENNYKTTPPVLDS | |
| N297A | | | DGSFFLYSKLTVDKS | |
| and | | | RWQQGNVFSCSVMHE | |
| I253A) | | | ALHNHYTQKSLSLSP | |
| | | | G | |

| | SEQ | |
|---|---|---|
| Product released by | ID | |
| cleavage | NO | DC |
| LYSGPIWELKKDVYVVELDWYPDAP | 29 | AK380 |
| GEMVVLTCDTPEEDGITWTLDQSSE | | AK381 |
| VLGSGKTLTIQVKEFGDAGQYTCHK | | AK383 |
| GGEVLSHSLLLLHKKEDGIWSTDIL | | AK434 |
| KDQKEPKNKTFLRCEAKNYSGRFTC | | AK447 |
| WWLTTISTDLTFSVKSSRGSSDPQG | | AK448 |
| VTCGAATLSAERVRGDNKEYEYSVE | | AK528 |
| CQEDSACPAAEESLPIEVMVDAVHK | | AK529 |
| LKYENYTSSFFIRDIIKPDPPKNLQ | | AK382 |
| LKPLKNSRQVEVSWEYPDTWSTPHS | | AK384 |
| YFSLTFCVQVQGKSKREKKDRVFTD | | AK386 |
| KTSATVICRKNASISVRAQDRYYSS | | AK446 |
| SWSEWASVPCSGGGGSGGGGSGGGG | | AK604 |
| SRNLPVATPDPGMFPCLHHSQNLLR | | |
| AVSNMLQKARQTLEFYPCTSEEIDH | | |
| EDITKDKTSTVEACLPLELTKNESC | | |
| LNSRETSFITNGSCLASRKTSFMMA | | |
| LCLSSIYEDLKMYQVEFKTMNAKLL | | |
| MDPKRQIFLDQNMLAVIDELMQALN | | |
| FNSETVPQKSSLEEPDFYKTKIKLC | | |
| ILLHAFRIRAVTIDRVMSYLNAS | | |
| LYSGPIWELKKDVYVVELDWYPDAP | 66 | AK605 |
| GEMVVLTCDTPEEDGITWTLDQSSE | | |
| VLGSGKTLTIQVKEFGDAGQYTCHK | | |
| GGEVLSHSLLLLHKKEDGIWSTDIL | | |
| KDQKEPKNKTFLRCEAKNYSGRFTC | | |
| WWLTTISTDLTFSVKSSRGSSDPQG | | |
| VTCGAATLSAERVRGDNKEYEYSVE | | |
| CQEDSACPAAEESLPIEVMVDAVHK | | |
| LKYENYTSSFFIRDIIKPDPPKNLQ | | |
| LKPLKNSRQVEVSWEYPDTWSTPHS | | |
| YFSLTFSVQVQGKSKREKKDRVFTD | | |
| KTSATVICRKNASISVRAQDRYYSS | | |
| SWSEWASVPCSGGGGSGGGGSGGGG | | AK606 |
| SRNLPVATPDPGMFPCLHHSQNLLR | | |
| AVSNMLQKARQTLEFYPCTSEEIDH | | |
| EDITKDKTSTVEACLPLELTKNESC | | |
| LNSRETSFITNGSCLASRKTSFMMA | | |
| LCLSSIYEDLKMYQVEFKTMNAKLL | | |
| MDPKRQIFLDQNMLAVIDELMQALN | | |
| FNSETVPQKSSLEEPDFYKTKIKLC | | |
| ILLHAFRIRAVTIDRVMSYLNAS | | |
| LYSGPIWELKKDVYVVELDWYPDAP | 67 | AK665 |
| GEMVVLTCDTPEEDGITWTLDOSSE | | |
| VLGSGKTLTIQVKEFGDAGQYTCHK | | |
| GGEVLSHSLLLLHKKEDGIWSTDIL | | |
| KDQKEPKNKTFLRCEAKNYSGRFTC | | |
| WWLTTISTDLTFSVKSSRGSSDPQG | | |
| VTCGAATLSAERVRGDNKEYEYSVE | | |
| CQEDSACPAAEESLPIEVMVDAVHK | | |
| LKYENYTSSFFIRDIIKPDPPKNLQ | | |
| LKPLKNSRQVEVSWEYPDTWSTPHS | | |
| YFSLTFSVQVQGKDNTEGRVFTDKT | | |
| SATVICRKNASISVRAQDRYYSSSW | | |
| SEWASVPCSGGGGSGGGGSGGGGSR | | |
| NLPVATPDPGMFPCLHHSQNLLRAV | | |
| SNMLQKARQTLEFYPCTSEEIDHED | | |
| ITKDKTSTVEACLPLELTKNESCLN | | |
| SRETSFITNGSCLASRKTSFMMALC | | |
| LSSIYEDLKMYQVEFKTMNAKLLMD | | |
| PKRQIFLDQNMLAVIDELMQALNFN | | |
| SETVPQKSSLEEPDFYKTKIKLCIL | | |
| LHAFRIRAVTIDRVMSYLNAS | | |
| LYSGPIWELKKDVYVVELDWYPDAP | 68 | AK666 |
| GEMVVLTCDTPEEDGITWTLDQSSE | | |
| VLGSGKTLTIQVKEFGDAGQYTCHK | | |
| GGEVLSHSLLLLHKKEDGIWSTDIL | | |
| KDQKEPKNKTFLRCEAKNYSGRFTC | | |
| WWLTTISTDLTFSVKSSRGSSDPQG | | |
| VTCGAATLSAERVRGDNKEYEYSVE | | |
| CQEDSACPAAEESLPIEVMVDAVHK | | |
| LKYENYTSSFFIRDIIKPDPPKNLQ | | |
| LKPLKNSRQVEVSWEYPDTWSTPHS | | |
| YFSLTFSVQVQGKDNTEGRVFTDKT | | |
| SATVICRKNASISVRAQDRYYSSSW | | |
| SEWASVPCSGGGGSGGGGSGGGGSR | | |
| NLPVATPDPGMFPCLHHSQNLLRAV | | |
| SNMLQKARQTLEFYPCTSEEIDHED | | |
| ITKDKTSTVEACLPLELTKNESCLN | | |
| SRETSFITNGSCLASRKTSFMMALC | | |
| LSSIYEDLKMYQVEFKTMNAKLLMD | | |
| PKRQIFLDQNMLAVIDELMQALNFN | | |
| SETVPQKSSLEEPDFYKTKIKLCIL | | |
| LHAFRIRAVTIDRVMSYLNAS | | |
| LYHPSGPIWELKKDVYVVELDWYPD | 69 | AK667 |
| APGEMVVLTCDTPEEDGITWTLDQS | | |
| SEVLGSGKTLTIQVKEFGDAGQYTC | | |
| HKGGEVLSHSLLLLHKKEDGIWSTD | | |
| ILKDQKEPKNKTFLRCEAKNYSGRF | | |
| TCWWLTTISTDLTFSVKSSRGSSDP | | |
| QGVTCGAATLSAERVRGDNKEYEYS | | |
| VECQEDSACPAAEESLPIEVMVDAV | | |
| HKLKYENYTSSFFIRDIIKPDPPKN | | |
| LQLKPLKNSRQVEVSWEYPDTWSTP | | |
| HSYFSLTFSVQVQGKDNTEGRVFTD | | |
| KTSATVICRKNASISVRAQDRYYSS | | |
| SWSEWASVPCSGGGGSGGGGSGGGG | | |
| SRNLPVATPDPGMFPCLHHSQNLLR | | |
| AVSNMLQKARQTLEFYPCTSEEIDH | | |
| EDITKDKTSTVEACLPLELTKNESC | | |
| LNSRETSFITNGSCLASRKTSFMMA | | |
| LCLSSIYEDLKMYQVEFKTMNAKLL | | |
| MDPKRQIFLDQNMLAVIDELMQALN | | |
| FNSETVPQKSSLEEPDFYKTKIKLC | | |
| ILLHAFRIRAVTIDRVMSYLNAS | | |
| LYHPSGPIWELKKDVYVVELDWYPD | 70 | AK668 |
| APGEMVVLTCDTPEEDGITWTLDQS | | |
| SEVLGSGKTLTIQVKEFGDAGQYTC | | |
| HKGGEVLSHSLLLLHKKEDGIWSTD | | |
| ILKDQKEPKNKTFLRCEAKNYSGRF | | |
| TCWWLTTISTDLTFSVKSSRGSSDP | | |
| QGVTCGAATLSAERVRGDNKEYEYS | | |
| VECQEDSACPAAEESLPIEVMVDAV | | |
| HKLKYENYTSSFFIRDIIKPDPPKN | | |
| LQLKPLKNSRQVEVSWEYPDTWSTP | | |
| HSYFSLTFSVQVQGKDNTEGRVFTD | | |
| KTSATVICRKNASISVRAQDRYYSS | | |
| SWSEWASVPCSGGGGSGGGGSGGGG | | |
| SRNLPVATPDPGMFPCLHHSQNLLR | | |
| AVSNMLQKARQTLEFYPCTSEEIDH | | |
| EDITKDKTSTVEACLPLELTKNESC | | |
| LNSRETSFITNGSCLASRKTSFMMA | | |
| LCLSSIYEDLKMYQVEFKTMNAKLL | | |
| MDPKRQIFLDQNMLAVIDELMQALN | | |
| FNSETVPQKSSLEEPDFYKTKIKLC | | |
| ILLHAFRIRAVTIDRVMSYLNAS | | |
| SGRSSGPIWELKKDVYVVELDWYPD | 71 | AK669 |
| APGEMVVLTCDTPEEDGITWTLDQS | | |
| SEVLGSGKTLTIQVKEFGDAGQYTC | | |
| HKGGEVLSHSLLLLHKKEDGIWSTD | | |
| ILKDQKEPKNKTFLRCEAKNYSGRF | | |
| TCWWLTTISTDLTFSVKSSRGSSDP | | |
| QGVTCGAATLSAERVRGDNKEYEYS | | |
| VECQEDSACPAAEESLPIEVMVDAV | | |
| HKLKYENYTSSFFIRDIIKPDPPKN | | |
| LQLKPLKNSRQVEVSWEYPDTWSTP | | |
| HSYFSLTFSVQVQGKDNTEGRVFTD | | |
| KTSATVICRKNASISVRAQDRYYSS | | |
| SWSEWASVPCSGGGGSGGGGSGGGG | | |
| SRNLPVATPDPGMFPCLHHSQNLLR | | |
| AVSNMLQKARQTLEFYPCTSEEIDH | | |
| EDITKDKTSTVEACLPLELTKNESC | | |
| LNSRETSFITNGSCLASRKTSFMMA | | |
| LCLSSIYEDLKMYQVEFKTMNAKLL | | |
| MDPKRQIFLDQNMLAVIDELMQALN | | |
| FNSETVPQKSSLEEPDFYKTKIKLC | | |
| ILLHAFRIRAVTIDRVMSYLNAS | | |
| SGRSSGPIWELKKDVYVVELDWYPD | 72 | AK670 |
| APGEMVVLTCDTPEEDGITWTLDQS | | |
| SEVLGSGKTLTIQVKEFGDAGQYTC | | |
| HKGGEVLSHSLLLLHKKEDGIWSTD | | |
| ILKDQKEPKNKTFLRCEAKNYSGRF | | |
| TCWWLTTISTDLTFSVKSSRGSSDP | | |
| QGVTCGAATLSAERVRGDNKEYEYS | | |
| VECQEDSACPAAEESLPIEVMVDAV | | |
| HKLKYEINYTSSFFIRDIIKPDPPK | | |
| NLQLKPLKNSRQWVSWEYPDTWSTP | | |
| HSYFSLTFSVQVQGKDNTEGRWTDK | | |
| TSATVTCRKNASISVRAQDRYYSSS | | |
| WSEWASVPCSGGGGSGGGGSGGGGS | | |
| RNLPVATPDPGMFPCLHHSQNLLRA | | |
| VSNMLQKARQTLEFYPCTSEEIDHE | | |
| DITKDKTSTVEACLPLELTKNESCL | | |
| NSRETSFITNGSCLASRKTSFMMAL | | |
| CLSSIYEDLKMYQVEFKTMNAKLLM | | |
| DPKRQIFLDQNMLAVIDELMQALNF | | |
| NSETVPQKSSLEEPLNWKTKIKLCI | | |
| LLHAFRIRAVTIDRVMSYLNAS | | |
| SGRSSGPIWELKKDVYVVELDWYPD | 73 | AK922 |
| APGEMVVLTCDTPEEDGITWTLDQS | | |
| SEVLGSGKTLTIQVKEFGDAGQYTC | | |
| HKGGEVLSHSLLLLHKKEDGIWSTD | | |
| ILKDQKEPKNKTFLRCEAKNYSGRF | | |
| TCWWLTTISTDLTFSVKSSRGSSDP | | |
| QGVTCGAATLSAERVRGDNKEYEYS | | |
| VECQEDSACPAAEESLPIEVMVDAV | | |
| HKLKYENYTSSFFIRDIIKPDPPKN | | |
| LQLKPLKNSRQVEVSWEYPDTWSTP | | |
| HSYFSLTFSVQVQGKDNTEGRVFTD | | |
| KTSATVICRKNASISVRAQDRYYSS | | |
| SWSEWASVPCSGGGGSGGGGSGGGG | | |
| SRNLPVATPDPGMFPCLHHSQNLLR | | |
| AVSNMLQKARQTLEFYPCTSEEIDH | | |
| EDITKDKTSTVEACLPLELTKNESC | | |
| LNSRETSFITNGSCLASRKTSFMMA | | |
| LCLSSIYEDLKMYQVEFKTMNAKLL | | |
| MDPKRQIFLDQNMLAVIDELMQALN | | |
| FNSETVPQKSSLEEPDFYKTKIKLC | | |
| ILLHAFRIRAVTIDRVMSYLNAS | | |
| SGRSSGPIWELKKDVYVVELDWYPD | 74 | AK923 |
| APGEMVVLTCDTPEEDGITWTLDQS | | |
| SEVLGSGKTLTIQVKEFGDAGQYTC | | |
| HKGGEVLSHSLLLLHKKEDGIWSTD | | |
| ILKDQKEPKNKTFLRCEAKNYSGRF | | |
| TCWWLTTISTDLTFSVKSSRGSSDP | | |
| QGVTCGAATLSAERVRGDNKEYEYS | | |
| VECQEDSACPAAEESLPIEVMVDAV | | |
| HKLKYENYTSSFFIRDIIKPDPPKN | | |
| LQLKPLKNSRQVEVSWEYPDTWSTP | | |
| HSYFSLTFSVQVQGKDNTEGRVFTD | | |
| KTSATVICRKNASISVRAQDRYYSS | | |
| SWSEWASVPCSGGGGSGGGGSGGGG | | |
| SRNLPVATPDPGMFPCLHHSQNLLR | | |
| AVSNMLQKARQTLEFYPCTSEEIDH | | |
| EDITKDKTSTVEACLPLELTKNESC | | |
| LNSRETSFITNGSCLASRKTSFMMA | | |
| LCLSSIYEDLKMYQVEFKTMNAKLL | | |
| MDPKRQIFLDQNMLAVIDELMQALN | | |
| FNSETVPQKSSLEEPDFYKTKIKLC | | |
| ILLHAFRIRAVTIDRVMSYLNAS | | |
| FMLTSGPIWELKKDVYVVELDWYPD | 75 | AK918 |
| APGEMVVLTCDTPEEDGITWTLDQS | | |
| SEVLGSGKTLTIQVKEFGDAGQYTC | | |
| HKGGEVLSHSLLLLHKKEDGIWSTD | | |
| ILKDQKEPKNKTFLRCEAKNYSGRF | | |
| TCWWLTTISTDLTFSVKSSRGSSDP | | |
| QGVTCGAATLSAERVRGDNKEYEYS | | |
| VECQEDSACPAAEESLPIEVMVDAV | | |
| HKLKYENYTSSFFIRDIIKPDPPKN | | |
| LQLKPLKNSRQVEVSWEYPDTWSTP | | |
| HSYFSLTFSVQVQGKDNTEGRVFTD | | |
| KTSATVICRKNASISVRAQDRYYSS | | |
| SWSEWASVPCSGGGGSGGGGSGGGG | | |
| SRNLPVATPDPGMFPCLHHSQNLLR | | |
| AVSNMLQKARQTLEFYPCTSEEIDH | | |
| EDITKDKTSTVEACLPLELTKNESC | | |
| LNSRETSFITNGSCLASRKTSFMMA | | |
| LCLSSIYEDLKMYQVEFKTMNAKLL | | |
| MDPKRQIFLDQNMLAVIDELMQALN | | |
| FNSETVPQKSSLEEPDFYKTKIKLC | | |
| ILLHAFRIRAVTIDRVMSYLNAS | | |
| FMLTSGPIWELKKDVYVVELDWYPD | 76 | AK919 |
| APGEMVVLTCDTPEEDGITWTLDQS | | |
| SEVLGSGKTLTIQVKEFGDAGQYTO | | |
| HKGGEVLSHSLLLLHKKEDGIWSTD | | |
| ILKDQKEPKNKTFLRCEAKNYSGRF | | |
| TCWWLTTISTDLTFSVKSSRGSSDP | | |
| QGVTCGAATLSAERVRGDNKEYEYS | | |
| VECQEDSACPAAEESLPIEVMVDAV | | |
| HKLKYENYTSSFFIRDIIKPDPPKN | | |
| LQLKPLKNSRQVEVSWEYPDTWSTP | | |
| HSYFSLTFSVQVQGKDNTEGRVFTD | | |
| KTSATVICRKNASISVRAQDRYYSS | | |
| SWSEWASVPCSGGGGSGGGGSGGGG | | |
| SRNLPVATPDPGMFPCLHHSQNLLR | | |
| AVSNMLQKARQTLEFYPCTSEEIDH | | |
| EDITKDKTSTVEACLPLELTKNESC | | |
| LNSRETSFITNGSCLASRKTSFMMA | | |
| LCLSSIYEDLKMYQVEFKTMNAKLL | | |
| MDPKRQIFLDQNMLAVIDELMQALN | | |
| FNSETVPQKSSLEEPDFYKTKIKLC | | |
| ILLHAFRIRAVTIDRVMSYLNAS | | |
| VKSPSGPIWELKKDVYVVELDWYPD | 77 | AK920 |
| APGEMVVLTCDTPEEDGITWTLDQS | | |
| SEVLGSGKTLTIQVKEFGDAGQYTC | | |
| HKGGEVLSHSLLLLHKKEDGIWSTD | | |
| ILKDQKEPKNKTFLRCEAKNYSGRF | | |
| TCWWLTTISTDLTFSVKSSRGSSDP | | |
| QGVTCGAATLSAERVRGDNKEYEYS | | |
| VECQEDSACPAAEESLPIEVMVDAV | | |
| HKLKYENYTSSFFIRDIIKPDPPKN | | |
| LQLKPLKNSRQVEVSWEYPDTWSTP | | |
| HSYFSLTFSVQVQGKDNTEGRVFTD | | |
| KTSATVICRKNASISVRAQDRYYSS | | |
| SWSEWASVPCSGGGGSGGGGSGGGG | | |
| SRNLPVATPDPGMFPCLHHSQNLLR | | |
| AVSNMLQKARQTLEFYPCTSEEIDH | | |
| EDITKDKTSTVEACLPLELTKNESC | | |
| LNSRETSFITNGSCLASRKTSFMMA | | |
| LCLSSIYEDLKMYQVEFKTMNAKLL | | |
| MDPKRQIFLDQNMLAVIDELMQALN | | |
| FNSETVPQKSSLEEPDFYKTKIKLC | | |
| ILLHAFRIRAVTIDRVMSYLNAS | | |
| VKSPSGPIWELKKDVYVVELDWYPD | 78 | AK921 |
| APGEMVVLTCDTPEEDGITWTLDQS | | |
| SEVLGSGKTLTIQVKEFGDAGQYTC | | |
| HKGGEVLSHSLLLLHKKEDGIWSTD | | |
| ILKDQKEPKNKTFLRCEAKNYSGRF | | |
| TCWWLTTISTDLTFSVKSSRGSSDP | | |
| QGVTCGAATLSAERVRGDNKEYEYS | | |
| VECQEDSACPAAEESLPIEVMVDAV | | |
| HKLKYENYTSSFFIRDIIKPDPPKN | | |
| LQLKPLKNSRQVEVSWEYPDTWSTP | | |
| HSYFSLTFSVQVQGKDNTEGRVFTD | | |
| KTSATVICRKNASISVRAQDRYYSS | | |
| SWSEWASVPCSGGGGSGGGGSGGGG | | |
| SRNLPVATPDPGMFPCLHHSQNLLR | | |
| AVSNMLQKARQTLEFYPCTSEEIDH | | |
| EDITKDKTSTVEACLPLELTKNESC | | |
| LNSRETSFITNGSCLASRKTSFMMA | | |
| LCLSSIYEDLKMYQVEFKTMNAKLL | | |
| MDPKRQIFLDQNMLAVIDELMQALN | | |
| FNSETVPQKSSLEEPDFYKTKIKLC | | |
| ILLHAFRIRAVTIDRVMSYLNAS | | |
| VKSPSGPIWELKKDVYVVELDWYPD | 79 | AK924 |
| APGEMVVLTCDTPEEDGITWTLDQS | | |
| SEVLGSGKTLTIQVKEFGDAGQYTC | | |
| HKGGEVLSHSLLLLHKKEDGIWSTD | | |
| ILKDQKEPKNKTFLRCEAKNYSGRF | | |
| TCWWLTTISTDLTFSVKSSRGSSDP | | |
| QGVTCGAATLSAERVRGDNKEYEYS | | |
| VECQEDSACPAAEESLPIEVMVDAV | | |
| HKLKYENYTSSFFIRDIIKPDPPKN | | |
| LQLKPLKNSRQVEVSWEYPDTWSTP | | |
| HSYFSLTFSVQVQGKDNTEGRVFTD | | |
| KTSATVICRKNASISVRAQDRYYSS | | |
| SWSEWASVPCSGGGGSGGGGSGGGG | | |
| SRNLPVATPDPGMFPCLHHSQNLLR | | |
| AVSNMLQKARQTLEFYPCTSEEIDH | | |
| EDITKDKTSTVEACLPLELTKNESC | | |
| LNSRETSFITNGSCLASRKTSFMMA | | |
| LCLSSIYEDLKMYQVEFKTMNAKLL | | |
| MDPKRQIFLDQNMLAVIDELMQALN | | |
| FNSETVPQKSSLEEPDFYKTKIKLC | | |
| ILLHAFRIRAVTIDRVMSYLNAS | | |
| VKSPSGPIWELKKDVYVVELDWYPD | 80 | AK925 |
| APGEMVVLTCDTPEEDGITWTLDQS | | |
| SEVLGSGKTLTIQVKEFGDAGQYTC | | |
| HKGGEVLSHSLLLLHKKEDGIWSTD | | |
| ILKDQKEPKNKTFLRCEAKNYSGRF | | |
| TCWWLTTISTDLTFSVKSSRGSSDP | | |
| QGVTCGAATLSAERVRGDNKEYEYS | | |
| VECQEDSACPAAEESLPIEVMVDAV | | |
| HKLKYENYTSSFFIRDIIKPDPPKN | | |
| LQLKPLKNSRQVEVSWIJYPDTWST | | |
| PHSYFSLTFSVQVQGKDNTEGRVFT | | |
| DKTSATVICRKNASISVRAQDRYYS | | |
| SSWSEWASVPCSGGGGSGGGGSGGG | | |
| GSRNLPVATPDPGMFPCLHHSQNLL | | |
| RAVSNMLQKARQTLEFYPCTSEEID | | |
| HEDITKDKTSTVEACLPLELTKNES | | |
| CLNSRETSFITNGSCLASRKTSFMM | | |
| ALCLSSIYEDLKMYQVEFKTMNAKL | | |
| LMDPKRQIFLDQNMLAVIDELMQAL | | |
| NFNSETVPQKSSLEEPDFYKTKIKL | | |
| CILLHAFRIRAVTIDRVMSYLNAS | | |

| | | SEQ | | | |
|---|---|---|---|---|---|
| | | ID | | | |
| Component | | NO | Full Sequence | DC | |
| HL1-L1-MM | Hole: | 30 | DKTHTCPPCPAPELLGGPSVFLFPPKPKDTLMISRTPEVTCVVVDVSHEDPEVKFNW | AK384 | DNA410 |
| | hFc(N297A)- | | YVDGVEVHNAKTKPREEQYASTYRVVSVLTVLHQDWLNGKEYKCKVSNKALPAPIE | | |
| | hCD212(24-237) | | KTISKAKGQPREPQVCTLPPSRDELTKNQVSLSCAVKGFYPSDIAVEWESNGQPENN | | |
| | | | YKTTPPVLDSDGSFFLVSKLTVDKSRWQQGNVFSCSVMHEALHNHYTQKSLSLSPG | | |
| | | | GGGGSGGGGSCRTSECCFQDPPYPDADSGSASGPRDLRCYRISSDRYECSWQYEGP | | |
| | | | TAGVSHFLRCCLSSGRCCYFAAGSATRLQFSDQAGVSVLYTVTLWVESWARNQTEK | | |
| | | | SPEVTLQLYNSVKYEPPLGDIKVSKLAGQLRMEWETPDNQVGAEVQFRHRTPSSP | | |
| | | | WKLGDCGPQDDDTESCLCPLEMNVAQEFQLRRRQLGSQGSSWSKWSSPVCVPPENP | | |
| | Hole: | 31 | DKTHTCPPCPAPELLGGPSVFLFPPKPKDTLMISRTPEVTCVVVDVSHEDPEVKFN | AK380 | DNA409 |
| | hFc(N297A)- | | WYVDGVEVHNAKTKPREEQYASTYRVVSVLTVLHQDWLNGKEYKCKVSNKALP | AK381 | |
| | hCD212(24-545) | | APIEKTISKAKGQPREPQVCTLPPSRDELTKNQVSLSCAVKGFYPSDIAVEWESNG | AK382 | |
| | | | QPENNYKTTPPVLDSDGSFFLVSKLTVDKSRWQQGNVFSCSVMHEALHNHYT | | |
| | | | QKSLSLSPGGGGGSGGGGSCRTSECCFQDPPYPDADSGSASGPRDLRCYRISSD | | |
| | | | RYECSWQYEGPTAGVSHFLRCCLSSGRCCYFAAGSATRLQFSDQAGVSVLYTVT | | |
| | | | LWVESWARNQTEKSPEVTLQLYNSVKYEPPLGD1KVSKLAGQLRMEWETPDN | | |
| | | | QVGAEVQFRHRTPSSPWKLGDCGPQDDDTESCLCPLEMNVAQEFQLRRRQLG | | |
| | | | SQGSSWSKWSSPVCVPPENPPQPQVRFSVEQLGQDGRRRLTLKEQPTQLELPE | | |
| | | | GCQGLAPGTEVTYRLQLHMLSCPCKAKATRTLHLGKMPYLSGAAYNVAVISSNQ | | |
| | | | FGPGLNQTWHIPADTHTEPVALNISVGTNGTTMYWPARAQSMTYCIEWQPVGQ | | |
| | | | DGGLATCSLTAPQDPDPAGMATYSWSRESGAMGQEKCYYITIFASAHPEKLTLWS | | |
| | | | TVTSTYHFGGNASAAGTPHHVSVKNHSLDSVSVDWAPSLLSTCPGVTKEYVVRC | | |
| | | | RDEDSKQVSEHPVQPTETQVTLSGLRAGVAYTVQVRADTAWLRGVWSQPQRF | | |
| | | | SIEVQVSD | | |
| | Hole: | 32 | DKTHTCPPCPAPELLGGPSVFLFPPKPKDTLMISRTPEVTCVVVDVSHEDPEVKFN | AK528 | DNA629 |
| | hFc(N297A)- | | WYVDGVEVHNAKTKPREEQYASTYRVVSVLTVLHQDWLNGKEYKCKVSNKALPAP | | |
| | ILI2RB2(24-212) | | IEKTISKAKGQPREPQVCTLPPSRDELTKNQVSLSCAVKGFYPSDIAVEWESNGQPE | | |
| | | | NNYKTTPPVLDSDGSFFLVSKLTVDKSRWQQGNVFSCSVMHEALHNHYTQKSLSLSP | | |
| | | | GGGGGSGGGGSKIDACKRGDVTVKPSHVILLGSTVNITCSLKPRQGCFHYSRRNKLI | | |
| | | | LYKFDRRINFHHGHSLNSQVTGLPLGTTLFVCKLACINSDEIQICGAEIFVGVAPEQP | | |
| | | | QNLSCIQKGEQGTVACTWERGRDTHLYTEYTLQLSGPKNLTWQKQCKDIYCDYLDF | | |
| | | | GINLTPESPESNFTAKVTAVNSLGSSSSL | | |
| | Hole: | 33 | DKTHTCPPCPAPELLGGPSVFLFPPKPKDTLMISRTPEVTCVVVDVSHEDPEVKFNWY | AK446 | DNA539 |
| | hFc(N297A)- | | VDGVEVHNAKTKPREEQYASTYRVVSVLTVLHQDWLNGKEYKCKVSNKALPAPIEKTI | | |
| | ILI2RB2(24-222) | | SKAKGQPREPQVCTLPPSRDELTKNQVSLSCAVKGFYPSDIAVEWESNGQPENNYKTT | | |
| | | | PPVLDSDGSFFLVSKLTVDKSRWQQGNVFSCSVMHEALHNHYTQKSLSLSPGGGGG | | |
| | | | SGGGGSKIDACKRGDVTVKPSHVILLGSTVNITCSLKPRQGCFHYSRRNKLILYKFDRRI | | |
| | | | NFHHGHSLNSQVTGLPLGTTLFVCKLACINSDEIQICGAEIFVGVAPEQPQNLSCIQKGEQ | | |
| | | | GTVACTWERGRDTHLYTEYTLQLSGPKNLTWQKQCKDIYCDYLDFGINLTPESPESNFT | | |
| | | | AKVTAVNSLGSSSSLPSTFTFLDIV | | |
| | Hole: | 34 | DKTHTCPPCPAPELLGGPSVFLFPPKPKDTLMISRTPEVTCVVVDVSHEDPEVKFNWY | AK386 | DNA426 |
| | hFc(N297A)- | | VDGVEVHNAKTKPREEQYASTYRVVSVLTVLHQDWLNGKEYKCKVSNKALPAPIEKT | AK434 | |
| | IL12RB2(24-319) | | ISKAKGQPREPQVCTLPPSRDELTKNQVSLSCAVKGFYPSDIAVEWESNGQPENNYK | AK605 | |
| | | | TTPPVLDSDGSFFLVSKLTVDKSRWQQGNVFSCSVMHEALHNHYTQKSLSLSPGGG | | |
| | | | GGSGGGGSKIDACKRGDVTVKPSHVILLGSTVNITCSLKPRQGCFHYSRRNKLILYKF | | |
| | | | DRRINFHHGHSLNSQVTGLPLGTTLFVCKLACINSDEIQICGAEIFVGVAPEQPQNLS | | |
| | | | CIQKGEQGTVACTWERGRDTHLYTEYTLQLSGPKNLTWQKQCKDIYCDYLDFGINL | | |
| | | | TPESPESNFTAKVTAVNSLGSSSSLPSIFIFLDIVRPLPPWDIRIKFQKASVSRCTLYWR | | |
| | | | DEGLVLLNRLRYRPSNSRLWNMVNVTKAKGRHDLLDLKPFTEYEFQISSKLHLYKGSW | | |
| | | | SDWSESLRAQTPEE | | |
| | | 35 | DKTHTCPPCPAPELLGGPSVFLFPPKPKDTLMISRTPEVTCVVVDVSHEDPEVKF | AK448 | DNA541 |
| | | | NWYVDGVEVHNAKTKPREEQYASTYRVVSVLTVLHQDWLNGKEYKCKVSNKA | | |
| | | | LPAPIEKTISKAKGQPREPQVCTLPPSRDELTKNQVSLSCAVKGFYPSDIAVEWES | | |
| | | | NGQPENNYKTTPPVLDSDGSFFLVSKLTVDKSRWQQGNVFSCSVMHEALHNH | | |
| | | | YTQKSLSLSPGGGGGSKIDACKRGDVTVKPSHVILLGSTVNITCSLKPRQGCFHY | | |
| | | | SRRNKLILYKFDRRINFHHGHSLNSQVTGLPLGTTLFVCKLACINSDEIQICGAEIFV | | |
| | | | GVAPEQPQNLSCIQKGEQGTVACTWERGRDTHLYTEYTLQLSGPKNLTWQKQ | | |
| | | | CKDIYCDYLDFGINLTPESPESNFTAKVTAVNSLGSSSSLPSTFTFLDIVRPLPPW | | |
| | | | DIRIKFQKASVSRCTLYWRDEGLVLLNRLRYRPSNSRLWNMVNVTKAKGRHDL | | |
| | | | LDLKPFTEYEFQISSKLHLYKGSWSDWSESLRAQTPEE | | |
| | | 36 | DKTHTCPPCPAPELLGGPSVFLFPPKPKDTLMISRTPEVTCVVVDVSHEDPEVK | AK447 | DNA540 |
| | | | FNWYVDGVEVHNAKTKPREEQYASTYRVVSVLTVLHQDWLNGKEYKCKVSN | AK598 | |
| | | | KALPAPIEKTISKAKGQPREPQVCTLPPSRDELTKNQVSLSCAVKGFYPSDIAVE | AK600 | |
| | | | WESNGQPENNYKTTPPVLDSDGSFFLVSKLTVDKSRWQQGNVFSCSVMHEA | AK601 | |
| | | | LHNHYTQKSLSLSPGGGSGGGSGKIDACKRGDVTVKPSHVILLGSTVNITCSLKPR | | |
| | | | QGCFHYSRRNKLILYKFDRRINFHHGHSLNSQVTGLPLGTTLFVCKLACINSDEIQI | | |
| | | | CGAEIFVGVAPEQPQNLSCIQKGEQGTVACTWERGRDTHLYTEYTLQLSGPKN | | |
| | | | LTWQKQCKDIYCDYLDFGINLTPESPESNFTAKVTAVNSLGSSSSLPSTFTFLDIV | | |
| | | | RPLPPWDIRIKFQKASVSRCTLYWRDEGLVLLNRLRYRPSNSRLWNMVNVTK | | |
| | | | AKGRHDLLDLKPFTEYEFQISSKLHLYKGSWSDWSESLRAQTPEE | | |
| | Hole: | 37 | DKTHTCPPCPAPELLGGPSVFLFPPKPKDTLMISRTPEVTCVVVDVSHEDPE | AK383 | DNA425 |
| | hFc(N297A)- | | VKFNWYVDGVEVHNAKTKPREEQYASTYRVVSVLTVLHQDWLNGKEYKCK | | |
| | IL12RB2(24-622) | | VSNKALPAPIEKTISKAKGQPREPQVCTLPPSRDELTKNQVSLSCAVKGFYP | | |
| | | | SDIAVEWESNGQPENNYKTTPPVLDSDGSFFLVSKLTVDKSRWQQGNVFS | | |
| | | | CSVMHEALHNHYTQKSLSLSPGGGGGSGGGGSKIDACKRGDVTVKPSHVIL | | |
| | | | LGSTVNITCSLKPRQGCFHYSRRNKLILYKFDRRINFHHGHSLNSQVTGLPLG | | |
| | | | TTLFVCKLACINSDEIQICGAEIFVGVAPEQPQNLSCIQKGEQGTVACTWER | | |
| | | | GRDTHLYTEYTLQLSGPKNLTWQKQCKDIYCDYLDFGINLTPESPESNFTAK | | |
| | | | VTAVNSLGSSSSIPSTFTFLDIVRPLPPWDIRIKFQKASVSRCTLYWRDEGLV | | |
| | | | LLNRLRYRPSNSRLWNMVNVTKAKGRHDLLDLKPFTEYEFQISSKLHLYKGS | | |
| | | | WSDWSESLRAQTPEEEPTGMLDVWYMKRHIDYSRQQISLFWKNLSVSEAR | | |
| | | | GKILHYQVTLQELTGGKAMTQNITGHTSWTTVIPRTGNWAVAVSAANSKG | | |
| | | | SSLPTRINIMNLCEAGLLAPRQVSANSEGMDNILVTWQPPRKDPSAVQEYVV | | |
| | | | EWRELHPGGDTQVPLNWLRSRPYNVSALISENIKSYICYEIRVYALSGDQGGC | | |
| | | | SSILGNSKHKAPLSGPHINAITEEKGSILISWNSIPVQEQMGCLLHYRIYWKER | | |
| | | | DSNSQPQLCEIPYRVSQNSHPINSLQPRVTYVLWMTALTAAGESSHGNERE | | |
| | | | FCLQGKAN | | |
| | Hole: | 38 | DKTHTCPPCPAPELLGGPSVFLFPPKPKDTLMISRTPEVTCVVVDVSHEDPEVK | AK529 | DNA644 |
| | hFc(N297A)- | | FNWYVDGVEVHNAKTKPREEQYASTYRVVSVLTVLHQDWLNGKEYKCKVSN | | |
| | IL12RB2(24-227) | | KALPAPIEKTISKAKGQPREPQVCTLPPSRDELTKNQVSLSCAVKGFYPSDIAVE | | |
| | | | WESNGQPENNYKTTPPVLDSDGSFFLVSKLTVDKSRWQQGNVFSCSVMHEA | | |
| | | | LHNHYTQKSLSLSPGGGGGSGGGGSKIDACKRGDVTVKPSHVILLGSTVNITCS | | |
| | | | LKPRQGCFHYSRRNKLILYKFDRRINFHHGHSLNSQVTGLPLGTTLFVCKLACIN | | |
| | | | SDEIQICGAEIFVGVAPEQPQNLSCIQKGEQGTVACTWERGRDTHLYTEYTLQL | | |
| | | | SGPKNLTWQKQCKDIYCDYLDFGINLTPESPESNFTAKVTAVNSLGSSSSLPSTF | | |
| | | | TFLDIVRPLPP | | |
| | Hole: | 81 | DKTHTCPPCPAPELLGGPSVFLFPPKPKDTLMISRTPEVTCVVVDVSHEDPEVK | AK604 | DNA720 |
| | hFc(N297A)- | | FNWYVDGVEVHNAKTKPREEQYASTYRVVSVLTVLHQDWLNGKEYKCKVS | AK606 | |
| | IL12RB2(24-319) | | NKALPAPIEKTISKAKGQPREPQVCTLPPSRDELTKNQVSLSCAVKGFYPSDIA | | |
| | (C242S] | | VEWESNGQPENNYKTTPPVLDSDGSFFLVSKLTVDKSRWQQGNVFSCSVMH | | |
| | | | EALHNHYTQKSLSLSPGGGGGSGGGGSKIDACKRGDVTVKPSHVILLGSTVNI | | |
| | | | TCSLKPRQGCFHYSRRNKLILYKFDRRINFHHGHSLNSQVTGLPLGTTLFVCK | | |
| | | | LACINSDEIQICGAEIFVGVAPEQPQNLSCIQKGEQGTVACTWERGRDTHLYTE | | |
| | | | YTLQLSGPKNLTWQKQCKDIYCDYLDFGINLTPESPESNFTAKVTAVNSLGSSS | | |
| | | | SLPSTFTFLDIVRPLPPWDIRIKFQKASVSRSTLYWRDEGLVLLNRLRYRPSNSR | | |
| | | | LWNMVNVTKAKGRHDLLDLKPFTEYEFQISSKLHLYKGSWSDWSESLRAQTPEE | | |
| | Hole: | 82 | DKTHTCPPCPAPELLGGPSVFLFPPKPKDTLMISRTPEVTCVVVDVSHEDPEVK | AK665 | DNA835 |
| | hFc(N297A)- | | FNWYVDGVEVHNAKTKPREEQYASTYRVVSVLTVLHQDWLNGKEYKCKVS | AK668 | |
| | IL12RB2(24-319) | | NKALPAPIEKTISKAKGQPREPQVCTLPPSRDELTKNQVSLSCAVKGFYPSDIAV | AK670 | |
| | [C242S] | | EWESNGQPENNYKTTPPVLDSDGSFFLVSKLTVDKSRWQQGNVFSCSVMHEA | AK919 | |
| | | | LHNHYTQKSLSLSPGGGSPGKIDACKRGDVTVKPSHVILLGSTVNITCSLKPRQ | AK921 | |
| | | | GCFHYSRRNKLILYKFDRRINFHHGHSLNSQVTGLPLGTTLFVCKLACINSDEI | | |
| | | | QICGAEIFVGVAPEQPQNLSCIQKGEQGTVACTWERGRDTHLYTEYTLQLSGP | | |
| | | | KNLTWQKQCKDIYCDYLDFGINLTPESPESNFTAKVTAVNSLGSSSSLPSTFTFL | | |
| | | | DIVRPLPPWDIRIKFQKASVSRSTLYWRDEGLVLLNRLRYRPSNSRLWNMVNVT | | |
| | | | KAKGRHDLLDLKPFTEYEFQISSKLHLYKGSWSDWSESLRAQTPEE | | |
| | Hole: | 83 | DKTHTCPPCPAPELLGGPSVFLFPPKPKDTLMISRTPEVTCVVVDVSHEDPEVK | AK666 | DNA838 |
| | hFc(N297A)- | | FNWYVDGVEVHNAKTKPREEQYASTYRVVSVLTVLHQDWLNGKEYKCKVS | AK667 | |
| | IL12RB2(24-319) | | NKALPAPIEKTISKAKGQPREPQVCTLPPSRDELTKNQVSLSCAVKGFYPSDIA | AK669 | |
| | (C242S] | | VEWESNGQPENNYKTTPPVLDSDGSFFLVSKLTVDKSRWQQGNVFSCSVMH | AK918 | |
| | | | EALHNHYTQKSLSLSPGPGGSGPKIDACKRGDVTVKPSHVILLGSTVNITCSLK | AK920 | |
| | | | PRQGCFHYSRRNKLILYKFDRRINFHHGHSLNSQVTGLPLGTTLFVCKLACINS | | |
| | | | DEIQICGAEIFVGVAPEQPQNLSCIQKGEQGTVACTWERGRDTHLYTEYTLQLS | | |
| | | | GPKNLTWQKQCKDIYCDYLDFGINLTPESPESNFTAKVTAVNSLGSSSSLPSTF | | |
| | | | TFLDIVRPLPPWDIRIKFQKASVSRSTLYWRDEGLVLLNRLRYRPSNSRLWNM | | |
| | | | VNVTKAKGRHDLLDLKPFTEYEFQISSKLHLYKGSWSDWSESLRAQTPEE | | |
| | Hole: | 84 | DKTHTCPPCPAPELLGGPSVFLFPPKPKDTLMISRTPEVTCVVVDVSHEDPEV | AK922 | DNA915 |
| | hFc(N297A)- | | KFNWYVDGVEVHNAKTKPREEQYASTYRVVSVLTVLHQDWLNGKEYKCK | AK923 | |
| | ILI2RB2(24-319) | | VSNKALPAPIEKTISKAKGQPREPQVCTLPPSRDELTKNQVSLSCAVKGFYPS | AK924 | |
| | [C242S] | | DIAVEWESNGQPENNYKTTPPVLDSDGSFFLVSKLTVDKSRWQQGNVFSCSV | AK925 | |
| | | | MHEALHNHYTQKSLSLSPGGGSGGGSGKIDACKRGDVTVKPSHVILLGSTVNI | | |
| | | | TCSLKPRQGCFHYSRRNKLILYKFDRRINFHHGHSLNSQVTGLPLGTTLVCKL | | |
| | | | ACINSDEIQICGAEIFVGVAPEQPQNLSCIQKGEQGTVACTWERGRDTHLYTEY | | |
| | | | TLQLSGPKNLTWQKQCKDIYCDYLDFGINLTPESPESNFTAKVTAVNSLGSSS | | |
| | | | SLPSTFTFLDIVRPLPPWDIRIKFQKASVSRSTLYWRDEGLVLLNRLRYRPSNSR | | |
| | | | LWNMVNVTKAKGRHDLLDLKPFTEYEFQISSKLHLYKGSWSDWSESLRAQTPEE | | |
| HL2-L2-C | Knob: | 39 | DKTHTCPPCPAPELLGGPSVFLFPPKPKDTLMISRTPEVTCVVVDVSHEDPEV | AK380 | DNA406 |
| | hFc(N297A)- | | KFNWYVDGVEVHNAKTKPREEQYASTYRVVSVLTVLHQDWLNGKEYKCKVSNKAL | AK434 | |
| | [VPLSLY]- | | PAPIEKTISKAKGQPREPQVYTLPPCRDELTKNQVSLWCLVKGFYPSDIAVEWESNG | | |
| | hIL12B-hIL12A | | QPENNYKTTPPVLDSDGSFFLYSKLTVDKSRWQQGNVFSCSVMHEALHNHYTQK | | |
| | | | SLSLSPGGGSGGSVPLSLYSGPIWELKKDVYVVELDWYPDAPGEMVVLTCDTPEED | | |
| | | | GITWTLDQSSEVLGSGKTLTIQVKEFGDAGQYTCHKGGEVLSHSLLLLHKKEDGIWS | | |
| | | | TDILKDQKEPKNKTFLRCEAKNYSGRFTCWWLTTISTDLTFSVKSSRGSSDPQGVTC | | |
| | | | GAATLSAERVRGDNKEYEYSVECQEDSACPAAEESLPIEVMVDAVHKLKYENYTSSFF | | |
| | | | IRDIIKPDPPKNLQLKPLKNSRQVEVSWEYPDTWSTPHSYFSLTFCVQVQGKSKREKK | | |
| | | | DRVFTDKTSATVICRKNASISVRAQDRYYSSSWSEWASVPCSGGGGSGGGGSGGGG | | |
| | | | SRNLPVATPDPGMFPCLHHSQNLLRAVSNMLQKARQTLEFYPCTSEEIDHEDITKDKT | | |
| | | | STVEACLPLELTKNESCLNSRETSFITNGSCLASRKTSFMMALCLSSIYEDLKMYQVEFK | | |
| | | | TMNAKLLMDPKRQIFLDQNMLAVIDELMQALNFNSETVPQKSSLEEPDFYKTKIKL | | |
| | | | CILLHAFRIRAVTIDRVMSYLNAS | | |
| | Knob: | 40 | DKTHTCPPCPAPELLGGPSVFLFPPKPKDTLMISRTPEVTCVVVDVSHEDPEVK | AK381 | DNA407 |
| | hFc(N297A)- | | FNWYVDGVEVHNAKTKPREEQYASTYRVVSVLTVLHQDWLNGKEYKCKVSN | AK383 | DNA408 |
| | [VPLSLY]- | | KALPAPIEKTISKAKGQPREPQVYTLPPCRDELTKNQVSLWCLVKGFYPSDIAVE | AK384 | |
| | hIL12B-hIL12A | | WESNGQPENNYKTTPPVLDSDGSFFLYSKLTVDKSRWQQGNVFSCSVMHEAL | AK386 | |
| | | | HNHYTQKSLSLSPGGGSGGSGGSVPLSLYSGPIWELKKDVYVVELDWYPDAPG | AK446 | |
| | | | EMVVLTCDTPEEDGITWTLDQSSEVLGSGKTLTIQVKEFGDAGQYTCHKGGEV | AK447 | |
| | | | LSHSLLLLHKKEDGIWSTDILKDQKEPKNKTFLRCEAKNYSGRFTCWWLTTISTD | AK448 | |
| | | | LTFSVKSSRGSSDPQGVTCGAATLSAERVRGDNKEYEYSVECQEDSACPAAEES | AK528 | |
| | | | LPIEVMVDAVHKLKYENYTSSFFIRDIIKPDPPKNLQLKPLKNSRQVEVSWEYPDT | AK529 | |
| | | | WSTPHSYFSLTFCVQVQGKSKREKKDRVFTDKTSATVICRKNASISVRAQDRYYSS | AK604 | |
| | | | SWSEWASVPCSGGGGSGGGGSGGGGSRNLPVATPDPGMFPCLIIHSQNLLRA | AK382 | |
| | | | VSNMLQKARQTLEFYPCTSEEIDHEDITKDKTSTVEACLPLELTKNESCLNSRETS | | |
| | | | FITNGSCLASRKTSFMMALCLSSIYEDLKMYQVEFKTMNAKLLMDPKRQIFLDQ | | |
| | | | NMLAVIDELMQALNFNSETVPQKSSLEEPDFYKTKIKLCILLHAFRIRAVTIDRVM | | |
| | | | SYLNAS | | |
| | Knob: | 85 | DKTHTCPPCPAPELLGGPSVFLFPPKPKDTLMISRTPEVTC | AK598 | DNA707 |
| | hFc(N297A)- | | VVVDVSHEDPEVKFNWYVDGVEVHNAKTKPREEQYASTY | | |
| | [non-cleavable]- | | RVVSVLTVLHQDWLNGKEYKCKVSNKALPAPIEKTISKAK | | |
| | IL-12 | | GQPREPQVYTLPPCRDELTKNQVSLWCLVKGFYPSDIAVE | | |
| | | | WESNGQPENNYKTTPPVLDSDGSFFLYSKLTVDKSRWQQ | | |
| | | | GNVFSCSVMHEALHNHYTQKSLSLSPGGGSGGSGGSGGSG | | |
| | | | GSSGPIWELKKDVYVVELDWYPDAPGEMVVLTCDTPEED | | |
| | | | GITWTLDQSSEVIGSGKTLTIQVKEFGDAGQYTCHKGGEVL | | |
| | | | SHSLLLLHKKEDGIWSTDILKDQKEPKNKTFLRCEAKNYSG | | |
| | | | RFTCWWLTTISTDLTFSVKSSRGSSDPQGVTCGAATLSAERV | | |
| | | | RGDNKEYEYSVECQEDSACPAAEESLPIEVMVDAVHKLKYE | | |
| | | | NYTSSFFIRDIIKPDPPKNLQLKPLKNSRQVEVSWEYPDTWS | | |
| | | | TPHSYFSLTFCVQVQGKSKREKKDRVFTDKTSATVICRKNAS | | |
| | | | ISVRAQDRYYSSSWSEWASVPCSGGGGSGGGGSGGGGSRNL | | |
| | | | PVATPDPGMFPCLHHSQNLLRAVSNMLQKARQTLEFYPCTSEE | | |
| | | | IDHEDITKDKTSTVEACLPLELTKNESCLNSRETSFITNGSCLASRKT | | |
| | | | SFMMALCLSSIYEDLKMYQVEFKTMNAKLLMDPKRQIFLDQNML | | |
| | | | AVIDELMQALNFNSETVPQKSSLEEPDFYKTKIKLCILLHAFRIRA | | |
| | | | VTIDRVMSYLNAS | | |
| | Knob: | 86 | DKTHTCPPCPAPELLGGPSVFLFPPKPKDTLMISRTPEVTCVVV | AK600 | DNA708 |
| | hFc(N297A)- | | DVSHEDPEVKFNWYVDGVEVHNAKTKPREEQYASTYRVVSVL | | |
| | [non-cleavable]- | | TVLHQDWLNGKEYKCKVSNKALPAPIEKTISKAKGQPREPQV | | |
| | IL-12 GAG | | YTLPPCRDELTKNQVSLWCLVKGFYPSDIAVEWESNGQPENN | | |
| | mutant | | YKTTPPVLDSDGSFFLYSKLTVDKSRWQQGNVFSCSVMHEAL | | |
| | KDNTERV | | HNHYTQKSLSLSPGGGSGGSGGSGGSGGSSGPIWELKKDVYVV | | |
| | | | ELDWYPDAPGEMVVLTCDTPEEDGITWTLDQSSEVLGSGKTLT | | |
| | | | IQVKEFGDAGQYTCHKGGEVLSHSLLLLHKKEDGIWSTDILKDQ | | |
| | | | KEPKNKTFLRCEAKNYSGRFTCWWLTTISTDLTFSVKSSRGSSD | | |
| | | | PQGVTCGAATLSAERVRGDNKEYEYSVECQEDSACPAAEESLP | | |
| | | | IEVMVDAVHKLKYENYTSSFFIRDIIKPDPPKNLQLKPLKNSRQV | | |
| | | | EVSWEYPDTWSTPHSYFSLTFCVQVQGKDNTERVFTDKTSATV | | |
| | | | ICRKNASISVRAQDRYYSSSWSEWASVPCSGGGGSGGGGSGG | | |
| | | | GGSRNLPVATPDPGMFPCLHHSQNLLRAVSNMLQKARQTLEFY | | |
| | | | PCTSEEIDHEDITKDKTSTVEACLPLELTKNESCLNSRETSFITNGS | | |
| | | | CLASRKTSFMMALCLSSIYEDLKMYQVEFKTMNAKLLMDPKRQI | | |
| | | | FLDQNMLAVIDELMQALNFNSETVPQKSSLEEPDFYKTKIKLCIL | | |
| | | | LHAFRIRAVTIDRVMSYLNAS | | |
| | Knob: | 87 | DKTHTCPPCPAPELLGGPSVFLFPPKPKDTLMISRTPEVTCVVVDVS | AK601 | DNA709 |
| | hFc(N297A)- | | HEDPEVKFNWYVDGVEVHNAKTKPREEQYASTYRVVSVLTVLHQ | | |
| | [non-cleavable]- | | DWLNGKEYKCKVSNKALPAPIEKTISKAKGQPREPQVYTLPPCRDE | | |
| | IL-12 GAG | | LTKNQVSIWCLVKGFYPSDIAVEWESNGQPENNYKTTPPVLDSDG | | |
| | mutant | | SFFLYSKLTVDKSRWQQGNVFSCSVMHEALHNHYTQKSLSLSPGG | | |
| | KDNTEGRV | | GSGGSGOSGGSGGSSGPIWELKKDVYVVELDWYPDAPGEMVVLT | | |
| | | | CDTPEEDGITWTLDQSSEVLGSGKTLTIQVKEFGDAGQYTCHKGGE | | |
| | | | VLSHSLLLLHKKEDGIWSTDILKDQKEPKNKTFLRCEAKNYSGRFT | | |
| | | | CWWLTTISTDLTFSVKSSRGSSDPQGVTCGAATLSAERVRGDNKEY | | |
| | | | EYSVECQEDSACPAAEESLPIEVMVDAVHKLKYENYTSSFFIRDIIKP | | |
| | | | DPPKNLQLKPLKNSRQVEVSWEYPDTWSTPHSYFSLTFCVQVQGK | | |
| | | | DNTEGRVFTDKTSATVICRKNASISVRAQDRYYSSSWSEWASVPCSG | | |
| | | | GGGSGGGGSGGGGSRNLPVATPDPGMFPCLHHSQNLLRAVSNMLQ | | |
| | | | KARQTLEFYPCTSEEIDHEDITKDKTSTVEACLPLELTKNESCLNSRET | | |
| | | | SFITNGSCLASRKTSFMMALCLSSIYEDLKMYQVEFKTMNAKLLMDP | | |
| | | | KRQIFLDQNMLAVIDELMQALNFNSETVPQKSSLEEPDFYKTKIKLCILL | | |
| | | | HAFRIRAVTIDRVMSYLNAS | | |
| | Knob: | 88 | DKTHTCPPCPAPELLGGPSVFLFPPKPKDTLMISRTPEVTCVVVDVSHED | AK605 | DNA719 |
| | hFc(N297A)- | | PEVKFNWYVDGVEVHNAKTKPREEQYASTYRVVSVLTVLHQDWLNG | AK606 | |
| | [VPLSLY]- | | KEYKCKVSNKALPAPIEKTISKAKGQPREPQVYTLPPCRDELTKNQVSL | | |
| | hIL12B-hIL12A | | WCLVKGFYPSDIAVEWESNGQPENNYKTTPPVLDSDGSFFLYSKLTVD | | |
| | [C252S] | | KSRWQQGNVFSCSVMHEALHNHYTQKSLSLSPGGGSGGSGGSVPLSLY | | |
| | | | SGPIWELKKDVYVVELDWYPDAPGEMVVLTCDTPEEDGITWTLDQSSE | | |
| | | | VLGSGKTLTIQVKEFGDAGQYTCHKGGEVLSHSLLLLHKKEDGIWSTD | | |
| | | | ILKDQKEPKNKTFLRCEAKNYSGRFTCWWLTTISTDLTFSVKSSRGSSD | | |
| | | | PQGVTCGAATLSAERVRGDNKEYEYSVECQEDSACPAAEESLPIEVMV | | |
| | | | DAVHKLKYENYTSSFFIRDIIKPDPPKNLQLKPLKNSRQVEVSWEYPDT | | |
| | | | WSTPHSYFSLTFSVQVQGKSKREKKDRVFTDKTSATVICRKNASISVRA | | |
| | | | QDRYYSSSWSEWASVPCSGGGGSGGGGSGGGGSRNLPVATPDPGMFPC | | |
| | | | LHHSQNLLRAVSNMLQKARQTLEFYPCTSEEIDHEDITKDKTSTVEACL | | |
| | | | PLELTKNESCLNSRETSFITNGSCLASRKTSFMMALCLSSIYEDLKMYQV | | |
| | | | EFKTMNAKLLMDPKRQIFLDQNMLAVIDELMQALNFNSETVPQKSSLEE | | |
| | | | PDFYKTKIKLCILLHAFRIRAVTIDRVMSYLNAS | | |
| | Knob: | 89 | DKTHTCPPCPAPELLGGPSVFLFPPKPKDTLMISRTPEVTCVVVDVSHED | AK665 | DNA830 |
| | hFc(N297A)- | | PEVKFNWYVDGVEVHNAKTKPREEQYASTYRVVSVLTVLHQDWLNGK | | |
| | [VPLSLYSG]-IL- | | EYKCKVSNKALPAPIEKTISKAKGQPREPQVYTLPPCRDELTKNQVSLWC | | |
| | 12 (p40C252S) | | LVKGFYPSDIAVEWESNGQPENNYKTTPPVLDSDGSFFLYSKLTVDKSR | | |
| | GAG mutant | | WQQGNVFSCSVMHEALHNHYTQKSLSLSPGGGSGGSGGSVPLSLYSGP | | |
| | KDNTEGRV | | IWELKKDVYVVELDWYPDAPGEMVVLTCDTPEEDGITWTLDQSSEVLG | | |
| | | | SGKTLTIQVKEFGDAGQYTCHKGGEVLSHSLLLLHKKEDGIWSTDILKDQ | | |
| | | | KEPKNKTFLRCEAKNYSGRFTCWWLTTISTDLTFSVKSSRGSSDPQGVTC | | |
| | | | GAATLSAERVRGDNKEYEYSVECQEDSACPAAEESLPIEVMVDAVHKLK | | |
| | | | YENYTSSFFIRDIIKPDPPKNLQLKPLKNSRQVEVSWEYPDTWSTPHSYFS | | |
| | | | LTFSVQVQGKDNTEGRVFTDKTSATVICRKNASISVRAQDRYYSSSWSE | | |
| | | | WASVPCSGGGGSGGGGSGGGGSRNLPVATPDPGMFPCLHHSQNLLRAVS | | |
| | | | NMLQKARQTLEFYPCTSEEIDHEDITKDKTSTVEACLPLELTKNESCLNSR | | |
| | | | ETSFITNGSCLASRKTSFMMALCLSSIYEDLKMYQVEFKTMNAKLLMDP | | |
| | | | KRQIFLDQNMLAVIDELMQALNFNSETVPQKSSLEEPDFYKTKIKLCILLH | | |
| | | | AFRIRAVTIDRVMSYLNAS | | |
| | Knob: | 90 | DKTHTCPPCPAPELLGGPSVFLFPPKPKDTLMISRTPEATCVVVDVSHEDP | AK666 | DNA831 |
| | hFc(N297A)- | | EVKFNWYVDGVEVHNAKTKPREEQYASTYRVVSVLTVLHQDWLNGKEY | | |
| | [VPLSLYSG]-IL- | | KCKVSNKALPAPIEKTISKAKGQPREPQVYTLPPCRDELTKNQVSLWCLV | | |
| | 12 (p40C252S) | | KGFYPSDIAVEWESNGQPENNYKTTPPVLDSDGSFFLYSKLTVDKSRWQ | | |
| | GAG mutant | | QGNVFSCSVMHEALHNHYTQKSLSLSPGGGSGGSVPLSLYSGPIWELKKD | | |
| | KDNTEGRV | | VYVVELDWYPDAPGEMVVLTCDTPEEDGITWTLDQSSEVLGSGKTLTIQV | | |
| | | | KEFGDAGQYTCHKGGEVLSHSLLLLHKKEDGIWSTDILKDQKEPKNKTFLR | | |
| | | | CEAKNYSGRFTCWWLTTISTDLTFSVKSSRGSSDPQGVTCGAATLSAERVR | | |
| | | | GDNKEYEYSVECQEDSACPAAEESLPIEVMVDAVHKLKYENYTSSFFIRDII | | |
| | | | KPDPPKNLQLKPLKNSRQVEVSWEYPDTWSTPHSYFSLTFSVQVQGKDNT | | |
| | | | EGRVFTDKTSATVICRKNASISVRAQDRYYSSSWSEWASVPCSGGGGSGGG | | |
| | | | GSGGGGSRNLPVATPDPGMFPCLHHSQNLLRAVSNMLQKARQTLEFYPCT | | |
| | | | SEEIDHEDITKDKTSTVEACLPLELTKNESCLNSRETSFITNGSCLASRKTSFM | | |
| | | | MALCLSSIYEDLKMYQVEFKTMNAKLLMDPKRQIFLDQNMLAVIDELMQA | | |
| | | | LNFNSETVPQKSSLEEPDFYKTKIKLCILLHAFRIRAVTIDRVMSYLNAS | | |
| | Knob: | 91 | DKTHTCPPCPAPELLGGPSVFLFPPKPKDTLMISRTPEVTCVVVDVSHEDPE | AK667 | DNA842 |
| | hFc(N297A)- | | VKFNWYVDGVEVHNAKTKPREEQYASTYRVVSVLTVLHQDWLNGKEYKC | | |
| | [MPYDLYHP]- | | KVSNKALPAPIEKTISKAKGQPREPQVYTLPPCRDELTKNQVSLWCLVKGFY | | |
| | IL-12 (p40C252S) | | PSDIAVEWESNGQPENNYKTTPPVLDSDGSFFLYSKLTVDKSRWQQGNVFS | | |
| | GAG mutant | | CSVMHEALHNHYTQKSLSLSPGGGSGGSMPYDLYHPSGPIWELKKDVYW | | |
| | KDNTEGRV | | ELDWYPDAPGEMVVLTCDTPEEDGITWTLDQSSEVLGSGKTLTIQVKEFGD | | |
| | | | AGQYTCHKGGEVLSHSLLLLHKKEDGIWSTDILKDQKEPKNKTFLRCEAKN | | |
| | | | YSGRFTCWWLTTISTDLTFSVKSSRGSSDPQGVTCGAATLSAERVRGDNKEY | | |
| | | | EYSVECQEDSACPAAEESLPIEVMVDAVHKLKYENYTSSFFIRDIIKPDPPKNL | | |
| | | | QLKPLKNSRQVEVSWEYPDTWSTPHSYFSLTFSVQVQGKDNTEGRVFTDKTS | | |
| | | | ATVICRKNASISVRAQDRYYSSSWSEWASVPCSGGGGSGGGGSGGGGSRNLP | | |
| | | | VATPDPGMFPCLHHSQNLLRAVSNMLQKARQTLEFYPCTSEEIDHEDITKDK | | |
| | | | TSTVEACLPLELTKNESCLNSRETSFTTNGSCLASRKTSFMMALCLSSIYEDLK | | |
| | | | MYQVEFKTMNAKLLMDPKRQIFLDQNMLAVIDELMQALNFNSETVPQKSS | | |
| | | | LEEPDFYKTKIKLCILLHAFRIRAVTIDRVMSYLNAS | | |
| | Knob: | 92 | DKTHTCPPCPAPELLGGPSVFLFPPKPKDTLMISRTPEVTCVVVDVSHEDPEVK | AK668 | DNA843 |
| | hFc(N297A)- | | FNWYVDGVEVHNAKTKPREEQYASTYRVVSVLTVLHQDWLNGKEYKCKVS | | |
| | [MPYDLYHP]- | | NKALPAPIEKTISKAKGQPREPQVYTLPPCRDELTKNQVSLWCLVKGFYPSDI | | |
| | IL-12 (p40C252S) | | AVEWESNGQPENNYKTTPPVLDSDGSFFLYSKLTVDKSRWQQGNVFSCSVM | | |
| | GAG mutant | | HEALHNHYTQKSLSLSPGGGSGGSGGSMPYDLYHPSGPIWELKKDVYVVE | | |
| | KDNTEGRV | | LDWYPDAPGEMVVLTCDTPEEDGITWTLDQSSEVLGSGKTLTIQVKEFGDA | | |
| | | | GQYTCHKGGEVLSHSLLLLHKKEDGIWSTDILKDQKEPKNKTFLRCEAKNY | | |
| | | | SGRFTCWWLTTISTDLTFSVKSSRGSSDPQGVTCGAATLSAERVRGDNKEYE | | |
| | | | YSVECQEDSACPAAEESLPIEVMVDAVHKLKYENYTSSFFIRDIIKPDPPKNLQ | | |
| | | | LKPLKNSRQVEVSWEYPDTWSTPHSYFSLTFSVQVQGKDNTEGRVFTDKTSA | | |
| | | | TVICRKNASISVRAQDRYYSSSWSEWASVPCSGGGGSGGGGSGGGGSRNLP | | |
| | | | VATPDPGMFPCLHHSQNLLRAVSNMLQKARQTLEFYPCTSEEIDHEDITKDK | | |
| | | | TSTVEACLPLELTKNESCLNSRETSFITNGSCLASRKTSFMMALCLSSIYEDLK | | |
| | | | MYQVEFKTMNAKLLMDPKRQIFLDQNMLAVIDELMQALNFNSETVPQKS | | |
| | | | SLEEPDFYKTKIKLCILLHAFRIRAVTIDRVMSYLNAS | | |
| | Knob: | 93 | DKTHTCPPCPAPELLGGPSVFLFPPKPKDTLMISRTPEVTCVVVDVSHEDPEV | AK669 | DNA850 |
| | hFc(N297A)- | | KFNWYVDGVEVHNAKTKPREEQYASTYRVVSVLTVLHQDWLNGKEYKCK | AK922 | |
| | [ISSGLLSGRS]- | | VSNKALPAPIEKTISKAKGQPREPQVYTLPPCRDELTKNQVSLWCLVKGFYP | | |
| | IL-12 (p40C252S) | | SDIAVEWESNGQPENNYKTTPPVLDSDGSFFLYSKLTVDKSRWQQGNVFSC | | |
| | GAG mutant | | SVMHEALHNHYTQKSLSLSPGGGSGGSISSGLLSGRSSGPIWELKKDVYVVE | | |
| | KDNTEGRV | | LDWYPDAPGEMVVLTCDTPEEDGITWTLDQSSEVLGSGKTLTIQVKEFGDA | | |
| | | | GQYTCHKGGEVLSHSLLLLHKKEDGIWSTDILKDQKEPKNKTFLRCEAKNY | | |
| | | | SGRFTCWWLTTISTDLTFSVKSSRGSSDPQGVTCGAATLSAERVRGDNKEYE | | |
| | | | YSVECQEDSACPAAEESLPIEVMVDAVHKLKYENYTSSFFIRDIIKPDPPKNL | | |
| | | | QLKPLKNSRQVEVSWEYPDTWSTPHSYFSLTFSVQVQGKDNTEGRVFTDKT | | |
| | | | SATVICRKNASISVRAQDRYYSSSWSEWASVPCSGGGGSGGGGSGGGGSRNL | | |
| | | | PVATPDPGMFPCLHHSQNLLRAVSNMLQKARQTLEFYPCTSEEIDHEDITKD | | |
| | | | KTSTVEACLPLELTKNESCLNSRETSFITNGSCLASRKTSFMMALCLSSIYEDLK | | |
| | | | MYQVEFKTMNAKLLMDPKRQIFLDQNMLAVIDELMQALNFNSETVPQKSS | | |
| | | | LEEPDFYKTKIKLCILLHAFRIRAVTIDRVMSYLNAS | | |
| | Knob: | 94 | DKTHTCPPCPAPELLGGPSVFLFPPKPKDTLMISRTPEVTCVVVDVSHEDPEV | AK670 | DNA851 |
| | hFc(N297A)- | | KFNWYVDGVEVHNAKTKPREEQYASTYRVVSVLTVLHQDWLNGKEYKCK | AK923 | |
| | [ISSGLLSGRS]- | | VSNKALPAPIEKTISKAKGQPREPQVYTLPPCRDELTKNQVSLWCLVKGFYPS | | |
| | IL-12 (p40C252S) | | DIAVEWESNGQPENNYKTTPPVLDSDGSFFLYSKLTVDKSRWQOGNVFSCS | | |
| | GAG mutant | | VMHEALHNHYTQKSLSLSPGGGSGGSGGSISSGLLSGRSSGPIWELKKDVYV | | |
| | KDNTEGRV | | VELDWYPDAPGEMVVLTCDTPEEDGITWTLDQSSEVLGSGKTLTIQVKEFG | | |
| | | | DAGQYTCHKGGEVLSHSLLLLHKKEDGIWSTDILKDQKEPKNKTFLRCEAK | | |
| | | | NYSGRFTCWWLTTISTDLTFSVKSSRGSSDPQGVTCGAATLSAERVRGDNKE | | |
| | | | YEYSVECQEDSACPAAEESLPIEVMVDAVHKLKYENYTSSFFIRDIIKPDPPK | | |
| | | | NLQLKPLKNSRQVEVSWEYPDTWSTPHSYFSLTFSVQVQGKDNTEGRVFTD | | |
| | | | KTSATVICRKNASISVRAQDRYYSSSWSEWASVPCSGGGGSGGGGSGGGGS | | |
| | | | RNLPVATPDPGMFPCLHHSQNLLRAVSNMLQKARQTLEFYPCTSEEIDHED | | |
| | | | ITKDKTSTVEACLPLELTKNESCLNSRETSFITNGSCLASRKTSFMMALCLSSI | | |
| | | | YEDLKMYQVEFKTMNAKLLMDPKRQIFLDQNMLAVIDELMQALNFNSE | | |
| | | | TVPQKSSLEEPDFYKTKIKLCILLHAFRIRAVTIDRVMSYLNAS | | |
| | Knob: | 95 | DKTHTCPPCPAPELLGGPSVFLFPPKPKDTLMISRTPEVTCVVVDVSHEDPEV | AK918 | DNA844 |
| | hFc(N297A)- | | KFNWYVDGVEVHNAKTKPREEQYASTYRVVSVLTVLHQDWLNGKEYKC | | |
| | [DSGGFMLT]- | | KVSNKALPAPIEKTISKAKGQPREPQVYTLPPCRDELTKNQVSLWCLVKGF | | |
| | IL-12 (p40C252S) | | YPSDIAVEWESNGQPENNYKTTPPVLDSDGSFFLYSKLTVDKSRWQQGNVF | | |
| | GAG mutant | | SCSVMHEALHNHYTQKSLSLSPGGGSGGSDSGGFMLTSGPIWELKKDVYV | | |
| | KDNTEGRV | | VELDWYPDAPGEMVVLTCDTPEEDGITWTLDQSSEVLGSGKTLTIQVKEFGD | | |
| | | | AGQYTCHKGGEVLSHSLLLLHKKEDGIWSTDILKDQKEPKNKTFLRCEAKNY | | |
| | | | SGRFTCWWLTTISTDLTFSVKSSRGSSDPQGVTCGAATLSAERVRGDNKEYE | | |
| | | | YSVECQEDSACPAAEESLPIEVMVDAVHKLKYENYTSSFFIRDIIKPDPPKNLQ | | |
| | | | LKPLKNSRQVEVSWEYPDTWSTPHSYFSLTFSVQVQGKDNTEGRVFTDKTSA | | |
| | | | TVICRKNASISVRAQDRYYSSSWSEWASVPCSGGGGSGGGGSGGGGSRNLPV | | |
| | | | ATPDPGMFPCLHHSQNLLRAVSNMLQKARQTLEFYPCTSEEIDHEDITKDK | | |
| | | | TSTVEACLPLELTKNESCLNSRETSFITNGSCLASRKTSFMMALCLSSIYEDLKM | | |
| | | | YQVEFKTMNAKLLMDPKRQIFLDQNMLAVIDELMQALNFNSETVPQKSS | | |
| | | | LEEPDFYKTKIKLCILLHAFRIRAVTIDRVMSYLNAS | | |
| | Knob: | 96 | DKTHTCPPCPAPELLGGPSVFLFPPKPKDTLMISRTPEVTCVVVDVSHEDP | AK919 | DNA845 |
| | hFc(N297A)- | | EVKFNWYVDGVEVHNAKTKPREEQYASTYRVVSVLTVLHQDWLNGKE | | |
| | [DSGGFMLT]- | | YKCKVSNKALPAPIEKTISKAKGQPREPQVYTLPPCRDELTKNQVSLWCL | | |
| | IL-12 (p40C252S) | | VKGFYPSDIAVEWESNGQPENNYKTTPPVLDSDGSFFLYSKLTVDKSRWQ | | |
| | GAG mutant | | QGNWSCSVMHEALHNHYTQKSLSLSPGGGSGGSGGSDSGGFMLTSGPI | | |
| | KDNTEGRV | | WELKKDVYVVELDWYPDAPGEMVVLTCDTPEEDGITWTLDQSSEVLOS | | |
| | | | GKTLTIQVKEFGDAGQYTCHKGGEVLSHSLLLLHKKEDGIWSTDILKDQK | | |
| | | | EPKNKTFLRCEAKNYSGRFTCWWLTTISTDLTFSVKSSRGSSDPQGVTCGA | | |
| | | | ATLSAERVRGDNKEYEYSVECQEDSACPAAEESLPIEVMVDAVHKLKYE | | |
| | | | NYTSSFFIRDIIKPDPPKNLQLKPLKNSRQVEVSWEYPDTWSTPHSYFSLTFS | | |
| | | | VQVQGKDNTEGRVFTDKTSATVICRKNASISVRAQDRYYSSSWSEWASVP | | |
| | | | CSGGGGSGGGGSGGGGSRNLPVATPDPGMFPCLHHSQNLLRAVSNMLQK | | |
| | | | ARQTLEFYPCTSEEIDHEDITKDKTSTVEACLPLELTKNESCLNSRETSFITN | | |
| | | | GSCLASRKTSFMMALCLSSTYEDLKMYQVEFKTMNAKLLMDPKRQIFLD | | |
| | | | QNMLAVIDELMQALNFNSETVPQKSSLEEPDFYKTKIKLCILLHAFRIRAV | | |
| | | | TIDRVMSYLNAS | | |
| | Knob: | 97 | DKTHTCPPCPAPELLGGPSVFLFPPKPKDTLMISRTPEVTCVVVDVSHED | AK920 | DNA846 |
| | hFc(N297A)- | | PEVKFNWYVDGVEVHNAKTKPREEQYASTYRVVSVLTVLHQDWLNGK | AK924 | |
| | [RAAAVKSP]- | | EYKCKVSNKALPAPIEKTISKAKGQPREPQVYTLPPCRDELTKNQVSLWC | | |
| | IL-12 (p40C252S) | | LVKGFYPSDIAVEWESNGQPENNYKTTPPVLDSDGSFFLYSKLTVDKSRW | | |
| | GAG mutant | | QQGNVFSCSVMHEALHNHYTQKSLSLSPGGGSGGSRAAAVKSPSGPIWE | | |
| | KDNTEGRV | | LKKDVYVVELDWYPDAPGEMVVLTCDTPEEDGITWTLDQSSEVLGSGK | | |
| | | | TLTIQVKEFGDAGQYTCHKGGEVLSHSLLLLHKKEDGIWSTDILKDQKEP | | |
| | | | KNKTFLRCEAKNYSGRFTCWWLTTISTDLTFSVKSSRGSSDPQGVTCGAA | | |
| | | | TLSAERVRGDNKEYEYSVECQEDSACPAAEESLPIEVMVDAVHKLKYEN | | |
| | | | YTSSFFIRDIIKPDPPKNLQLKPLKNSRQVEVSWEYPDTWSTPHSYFSLTFS | | |
| | | | VQVQGKDNTEGRVFTDKTSATVICRKNASISVRAQDRYYSSSWSEWASV | | |
| | | | PCSGGGGSGGGGSGGGGSRNLPVATPDPGMFPCLHHSQNLLRAVSNMLQ | | |
| | | | KARQTLEFYPCTSEEIDHEDITKDKTSTVEACLPLELTKNESCLNSRETSFI | | |
| | | | TNGSCLASRKTSFMMALCLSSIYEDLKMYQVEFKTMNAKLLMDPKRQIF | | |
| | | | LDQNMLAVIDELMQALNFNSETVPQKSSLEEPDFYKTKIKLCILLHAFRIR | | |
| | | | AVTIDRVMSYLNAS | | |
| | Knob: | 98 | DKTHTCPPCPAPELLGGPSVFLFPPKPKDTLMISRTPEVTCVVVDVSHEDPEV | AK921 | DNA847 |
| | hFc(N297A)- | | KFNWYVDGVEVHNAKTKPREEQYASTYRVVSVLTVLHQDWLNGKEYKC | AK925 | |
| | [RAAAVKSP]- | | KVSNKALPAPIEKTISKAKGQPREPQVYTLPPCRDELTKNQVSLWCLVKGF | | |
| | IL-12 (p40C252S) | | YPSDIAVEWESNGQPENNYKTTPPVLDSDGSFFLYSKLTVDKSRWQQGNV | | |
| | GAG mutant | | FSCSVMHEALHNHYTQKSLSLSPGGGSGGSGGSRAAAVKSPSGPIWELKKD | | |
| | KDNTEGRV | | VYVVELDWYPDAPGEMVVLTCDTPEEDGITWTLDQSSEVLGSGKTLTIQV | | |
| | | | KEFGDAGQYTCHKGGEVLSHSLLLLHKKEDGIWSTDILKDQKEPKNKTFL | | |
| | | | RCEAKNYSGRFTCWWLTTISTDLTFSVKSSRGSSDPQGVTCGAATLSAERV | | |
| | | | RGDNKEYEYSVECQEDSACPAAEESLPIEVMVDAVHKLKYENYTSSFFIRD | | |
| | | | IIKPDPPKNLQLKPLKNSRQVEVSWEYPDTWSTPHSYFSLTFSVQVQGKDN | | |
| | | | TEGRVFTDKTSATVICRKNASISVRAQDRYYSSSWSEWASVPCSGGGGSGG | | |
| | | | GGSGGGGSRNLPVATPDPGMFPCLHHSQNLLRAVSNMLQKARQTLEFYPC | | |
| | | | TSEEIDHEDITKDKTSTVEACLPLELTKNESCLNSRETSFITNGSCLASRKTSF | | |
| | | | MMALCLSSIYEDLKMYQVEFKTMNAKLLMDPKRQIFLDQNMLAVIDELM | | |
| | | | QALNFNSETVPQKSSLEEPDFYKTKIKLCILLHAFRIRAVTIDRVMSYLNAS | | |

### 11. LIST OF CONSTRUCTS

[0870] The table below shows the full sequences for molecules labelled by ‘AK’ reference number. The component parts of the sequence are also shown as well as the order in which they are assembled in the chains of the molecules. Individual chains are labelled by a ‘DNA’ reference number:

| [symbol] cule | name | newnames | Fc sequence | Linker | Component3Sequence |
|---|---|---|---|---|---|
| [symbol] 0 | DNA406 | Knob: hFc(N297A)- | DKTHTCPPCPAPELLGGPSVFLFPPKPKDTLMISRT | GGSGGS | VPLSLY |
| | | [VPLSLY]-hIL12B- | PEVTCVVVDVSHEDPEVKFNWYVDGVEVHNAKTK | | |
| | | hIL12A | PREEQYASTYRVVSVLTVLHQDWLNGKEYKCKVSN | | |
| | | | KALPAPIEKTISKAKGQPREPQVYTLPPCRDELTKN | | |
| | | | QVSLWCLVKGFYPSDIAVEWESNGQPENNYKTTP | | |
| | | | PVLDSDGSFFLYSKLTVDKSRWQQGNVFSCSVMH | | |
| | | | EALHNHYTQKSLSLSPG | | |
| [symbol] 0 | DNA409 | Hole: hFc(N297A)- | DKTHTCPPCPAPELLGGPSVFLFPPKPKDTLMISRT | GGGGSGGGGS | CRTSECCFQDPPYPDADSGSASGPRDLRCYRISSDRYECS |
| | | hCD212(24-545) | PEVTCVVVDVSHEDPEVKFNWYVDGVEVHNAKTK | | EGPTAGVSHFLRCCLSSGRCCYFAAGSATRLQFSDQAGV |
| | | | PREEQYASTYRVVSVLTVLHQDWLNGKEYKCKVSN | | TVTLWVESWARNQTEKSPEVTLQLYNSVKYEPPLGDIKV |
| | | | KALPAPIEKTISKAKGQPREPQVCTLPPSRDELTKN | | GQLRMEWETPDNQVGAEVQFRHRTPSSPWKLGDCGP |
| | | | QVSLSCAVKGFYPSDIAVEWESNGQPENNYKTFPP | | DTESCLCPLEMNVAQEFQLRRRQLGSQGSSWSKWSSP [symbol] |
| | | | VLDSDGSFFLVSKLIVDKSRWQQGNVFSCSVMHE | | PENPPQPQVRFSVEQLGQDGRRRLTLKEQPTQLELPEG [symbol] |
| | | | ALHNHYTQKSLSLSPG | | APGTEVTYRLQLHMLSCPCKAKATRTLHLGKMPYLSGA [symbol] |
| | | | | | AVISSNQFGPGLNQTWHIPADTHTEPVALNISVGTNGT [symbol] |
| | | | | | WPARAQSMTYCIEWQPVGQDGGLATCSLTAPQDPDP [symbol] |
| | | | | | ATYSWSRESGAMGQEKCYYITIFASAHPEKLTLWSTVLS [symbol] |
| | | | | | GGNASAAGTPHHVSVKNHSLDSVSVDWAPSLLSTCPG [symbol] |
| | | | | | VVRCRDEDSKQVSEHPVQPTETQVTLSGLRAGVAYTVQ [symbol] |
| | | | | | TAWLRGVWSQPQRFSIEVQVSD |
| [symbol] 1 | DNA407 | Knob: hFc(N297A)- | DKTHTCPPCPAPELLGGPSVFLFPPKPKDTLMISRT | GGSGGSGGS | VPLSLY |
| | | [VPLSLY]-hIL12B- | PEVTCVVVDVSHEDPEVKFNWYVDGVEVHNAKTK | | |
| | | KIL12A | PREEQYASTYRVVSVLTVLHQDWLNGKEYKCKVSN | | |
| | | | KALPAPIEKTISKAKGQPREPQVYTLPPCRDELTKN | | |
| | | | QVSLWCLVKGFYPSDIAVEWESNGQPENNYKTTP | | |
| | | | PVLDSDGSFFLYSKLTVDKSRWQQGNVFSCSVMH | | |
| | | | EALHNHYTQKSLSLSPG | | |
| [symbol] 1 | DNA409 | Hole: hFc(N297A)- | DKTHTCPPCPAPELLGGPSVFLFPPKPKDTLMISRT | GGGGSGGGGS | CRTSECCFQDPPYPDADSGSASGPRDLRCYRISSDRYECS |
| | | hCD212(24-545) | PEVTCVVVDVSHEDPEVKFNWYVDGVEVHNAKTK | | EGPTAGVSHFLRCCLSSGRCCYFAAGSATRLQFSDQAGV |
| | | | PREEQYASTYRVVSVLTVLHQDWLNGKEYKCKVSN | | TWLWVESWARNQTEKSPEVTLQLYNSVKYEPPLGDIKV |
| | | | KALPAPIEKTISKAKGQPREPQVCTLPPSRDELTKN | | GQLRMEWETPDNQVGAEVQFRHRTPSSPWKLGDCGP |
| | | | QVSLSCAVKGFYPSDIAVEWESNGQPENNYKTTPP | | DTESCLCPLEMNVAQEFQLRRRQLGSQGSSWSKWSSP [symbol] |
| | | | VLDSDGSFFLVSKLTVDKSRWQQGNVFSCSVMHE | | PENPPQPQVRFSVEQLGQDGRRRLTLKEQPTQLELPEG [symbol] |
| | | | ALHNHYTOKSLSLSPG | | APGTEVTYRLQLHMLSCPCKAKATRTLHLGKMPYLSGA [symbol] |
| | | | | | AVISSNQFGPGLNQTWHIPADTHTEPVALNISVGTNGT [symbol] |
| | | | | | WPARAQSMTYCIEWOPVGQDGGLATCSLTAPQDPDP [symbol] |
| | | | | | ATYSWSRESGAMGQEKCYYITIFASAHPEKLTLWSTVLS [symbol] |
| | | | | | GGNASAAGTPHHVSVKNHSLDSVSVDWAPSLLSTCPG [symbol] |
| | | | | | VVRCRDEDSKQVSEHPVQPTETQVTLSGLRAGVAYTVQ [symbol] |
| | | | | | TAWLRGVWSQPQRFSIEVQVSD |
| [symbol] 3 | DNA407 | Knob: hFc(N297A)- | DKTHTCPPCPAPELLGGPSVFLFPPKPKDTLMISRT | GGSGGSGGS | VPLSLY |
| | | [VPLSLY]-hIL12B- | PEVTCVVVDVSHEDPEVKFNWYVDGVEVHNAKTK | | |
| | | hIL12A | PREEQYASTYRVVSVLTVLHQDWLNGKEYKCKVSN | | |
| | | | KALPAPIEKTISKAKGQPREPQVCTLPPSRDELTKN | | |
| | | | QVSLWCLVKGFYPSDIAVEWESNGQPENNYKTTP | | |
| | | | PVLDSDGSFFLYSKLTVDKSRWQQGNVFSCSVMH | | |
| | | | EALHNHYTQKSLSLSPG | | |
| [symbol] 3 | DNA425 | Hole: hFc(N297A)- | DKTHTCPPCPAPELLGGPSVFLFPPKPKDTLMISRT | GGGGSGGGGS | KIDACKRGDVTVKPSHVILLGSTVNITCSLKPRQGCFHYS [symbol] |
| | | IL12RB2(24-622) | PEVTCVVVDVSHEDPEVKFNWYVDGVEVHNAKTK | | LILYKFDRRINFHHGHSLNSQVTGLPLGTTLFVCKLACINS |
| | | | PREEQYASTYRVVSVLTVLHQDWLNGKEYKCKVSN | | CGAEIFVGVAPEQPQNLSCIQKGEQGTVACTWERGRDT |
| | | | KALPAPIEKTISKAKGQPREPQVCTLPPSRDELTKN | | EYTLQLSGPKNLTWQKQCKDIYCDYLDFGINLTPESPESN |
| | | | QVSLSCAVKGFYPSDIAVEWESNGQPENNYKTTPP | | VTAVNSLGSSSSLPSTFTFLDIVRPLPPWDIRIKFQKASVS [symbol] |
| | | | VLDSDGSFFLVSKLTVDKSRWQQGNVFSCSVMHE | | YWRDEGLVLLNRLRYRPSNSRLWNMVNVTKAKGRHDL |
| | | | ALHNHYTQKSLSLSPG | | PFTEYEFQISSKLHLYKGSWSDWSESLRAQTPEEEPTGM [symbol] |
| | | | | | WYMKRHIDYSRQQISLFWKNLSVSEARGKILHYQVTLQE |
| | | | | | GKAMTQNITGHTSWTTVIPRTGNWAVAVSAANSKGSS |
| | | | | | NIMNLCEAGLLAPRQVSANSEGMDNILVTWQPPRKDP [symbol] |
| | | | | | EYVVEWRELHPGGDTQVPLNWLRSRPYNVSALISENIKS |
| | | | | | EIRVYALSGDQGGCSSILGNSKHKAPLSGPHINAITEEKGS |
| | | | | | WNSIPVQEQMGCLLHYRIYWKERDSNSQPQLCEIPYRV [symbol] |
| | | | | | HPINSLQPRVTYVLWMTALTAAGESSHGNEREFCLQGK [symbol] |
| [symbol] 4 | DNA407 | Knob: hFc(N297A)- | DKTHTCPPCPAPELLGGPSVFLFPPKPKDTLMISRT | GGSGGSGGS | VPLSLY |
| | | [VPLSLY]-hIL12B- | PEVTCVVVDVSHEDPEVKFNWYVDGVEVHNAKTK | | |
| | | hIL12A | PREEQYASTYRVVSVLTVLHQDWLNGKEYKCKVSN | | |
| | | | KALPAPIEKTISKAKGQPREPQVYTLPPCRDELTKN | | |
| | | | QVSLWCLVKGFYPSDIAVEWESNGQPENNYKTTP | | |
| | | | PVLDSDGSFFLYSKLTVDKSRWQQGNVFSCSVMH | | |
| | | | EALHNHYTQKSLSLSPG | | |
| [symbol] 4 | DNA410 | Hole: hFc(N297A)- | DKTHTCPPCPAPELLGGPSVFLFPPKPKDTLMISRT | GGGGSGGGGS | CRTSECCFQDPPYPDADSGSASGPRDLRCYRISSDRYECS |
| | | hCD212(24-237) | PEVTCVVVDVSHEDPEVKFNWYVDGVEVHNAKTK | | EGPTAGVSHFLRCCLSSGRCCYFAAGSATRLQFSDQAGV |
| | | | PREEQYASTYRVVSVLTVLHQDWLNGKEYKCKVSN | | TVTLWVESWARNQTEKSPEVTLQLYNSVKYEPPLGDIKV |
| | | | KALPAPIEKTISKAKGQPREPQVCTLPPSRDELTKN | | GQLRMEWETPDNQVGAEVQFRHRTPSSPWKLGDCGP [symbol] |
| | | | QVSLSCAVKGFYPSDIAVEWESNGQPENNYKTTPP | | DTESCLCPLEMNVAQEFQLRRRQLGSQGSSWSKWSSP [symbol] |
| | | | VLDSDGSFFLVSKLTVDKSRWQQGNVFSCSVMHE | | PENP |
| | | | ALHNHYTQKSLSLSPG | | |
| [symbol] 5 | DNA407 | Knob: hFc(N297A)- | DKTHTCPPCPAPELLGGPSVFLFPPKPKDTLMISRT | GGSGGSGGS | VPLSLY |
| | | [VPLSLY]-hIL12B | PEVTCVVVDVSHEDPEVKFNWYVDGVEVHNAKTK | | |
| | | hIL12A | PREEQYASTYRVVSVLTVLHQDWLNGKEYKCKVSN | | |
| | | | KALPAPIEKTISKAKGQPREPQVYTLPPCRDELTKN | | |
| | | | QVSLWCLVKGFYPSDIAVEWESNGQPENNYKTTP | | |
| | | | PVLDSDGSFFLYSKLTVDKSRWQQGNVFSCSVMH | | |
| | | | EALHNHYTQKSLSLSPG | | |
| [symbol] 5 | DNA426 | Hole: hFc(N297A)- | DKTHTCPPCPAPELLGGPSVFLFPPKPKDTLMISRT | GGGGSGGGGS | KIDACKRGDVTVKPSHVILLGSTVNITCSLKPRQGCFHYS [symbol] |
| | | IL12RB2(24-319) | PEVTCVVVDVSHEDPEVKFNWYVDGVEVHNAKTK | | LILYKFDRRINFHHGHSLNSQVTGLPLGTTLFVCKLACINS |
| | | | PREEQYASTYRVVSVLTVLHQDWLNGKEYKCKVSN | | CGAEIFVGVAPEQPQNLSCIQKGEQGTVACTWERGRDT |
| | | | KALPAPIEKTISKAKGQPREPQVCTLPPSRDELTKN | | EYTLQLSGPKNLTWQKQCKDIYCDYLDFGINLTPESPESN |
| | | | QVSLSCAVKGFYPSDIAVEWESNGQPENNYKTTPP | | VTAVNSLGSSSSLPSTFTFLDIVRPLPPWDIRIKFQKASVS [symbol] |
| | | | VLDSDGSFFLVSKLTVDKSRWQQGNVFSCSVMHE | | YWRDEGLVLLNRLRYRPSNSRLWNMVNVTKAKGRHDL |
| | | | ALHNHYTOKSLSLSPG | | PFTEYEFQISSKLHLYKGSWSDWSESLRAQTPEE |
| [symbol] 4 | DNA406 | Knob: hFc(N297A)- | DKTHTCPPCPAPELLGGPSVFLFPPKPKDTLMISRT | GGSGGS | VPLSLY |
| | | [VPLSLY]-hIL12B- | PEVTCVVVDVSHEDPEVKFNWYVDGVEVHNAKTK | | |
| | | hIL12A | PREEQYASTYRVVSVLTVLHQDWLNGKEYKCKVSN | | |
| | | | KALPAPIEKTISKAKGQPREPQVYTLPPCRDELTKN | | |
| | | | QVSLWCLVKGFYPSDIAVEWESNGQPENNYKTTP | | |
| | | | PVLDSDGSFFLYSKLIVDKSRWQQGNVFSCSVMH | | |
| | | | EALHNHYTQKSLSLSPG | | |
| [symbol] 4 | DNA426 | Hole: hFc(N297A)- | DKTHTCPPCPAPELLGGPSVFLFPPKPKDTLMISRT | GGGGSGGGGS | KIDACKRGDVFVKPSHVILLGSTVNITCSLKPRQGCFHYS [symbol] |
| | | IL12RB2(24-319) | PEVTCVVVDVSHEDPEVKFNWYVDGVEVHNAKTK | | LILYKFDRRINFHHGHSLNSQVTGLPLGTTLFVCKLACINS |
| | | | PREEQYASTYRVVSVLTVLHQDWLNGKEYKCKVSN | | CGAEIFVGVAPEQPQNLSCIQKGEQGTVACTWERGRDT |
| | | | KALPAPIEKTISKAKGQPREPQVCTLPPSRDELTKN | | EYTLQLSGPKNLTWQKQCKDIYCDYLDFGINLTPESPESN |
| | | | QVSLSCAVKGFYPSDIAVEWESNGQPENNYKTTPP | | VTAVNSLGSSSSLPSTFTFLDIVRPLPPWDIRIKFQKASVS [symbol] |
| | | | VLDSDGSFFLVSKLTVDKSRWQQGNVFSCSVMHE | | YWRDEGLVLLNRLRYRPSNSRLWNMVNVTKAKGRHDL |
| | | | ALHNHYTQKSLSLSPG | | PFTEYEFQISSKLHLYKGSWSDWSESLRAQTPEE |
| [symbol] 5 | DNA407 | Knob: hFc(N297A)- | DKTHTCPPCPAPELLGGPSVFLFPPKPKDTLMISRT | GGSGGSGGS | VPLSLY |
| | | [VPLSLY]-hIL12B- | PEVTCVVVDVSHEDPEVKFNWYVDGVEVHNAKTK | | |
| | | hIL12A | PREEQYASTYRVVSVLTVLHQDWLNGKEYKCKVSN | | |
| | | | KALPAPIEKTISKAKGQPREPQVYTLPPCRDELTKN | | |
| | | | QVSLWCLVKGFYPSDIAVEWESNGQPENNYKTTP | | |
| | | | PVLDSDGSFFLYSKLIVDKSRWQQGNVFSCSVMH | | |
| | | | EALHNHYTQKSLSLSPG | | |
| [symbol] 5 | DNA539 | Hole: hFc(N297A)- | DKTHTCPPCPAPELLGGPSVFLFPPKPKDTLMISRT | GGGGSGGGGS | KIDACKRGDVTVKPSHVILLGSTVNITCSLKPRQGCFHYS [symbol] |
| | | IL12RB2(24-222) | PEVTCVVVDVSHEDPEVKFNWYVDGVEVHNAKTK | | LILYKFDRRINFHHGHSLNSQVTGLPLGTTLFVCKLACINS |
| | | | PREEQYASTYRVVSVLTVLHQDWLNGKEYKCKVSN | | CGAEIFVGVAPEQPQNLSCIQKGEQGTVACTWERGRDT |
| | | | KALPAPIEKTISKAKGQPREPQVCTLPPSRDELTKN | | EYTLQLSGPKNLTWQKQCKDIYCDYLDFGINLTPESPESN |
| | | | QVSLSCAVKGFYPSDIAVEWESNGQPENNYKTTPP | | VTAVNSLGSSSSLPSTFTFLDIV |
| | | | VLDSDGSFFLVSKLTVDKSRWQQGNVFSCSVMHE | | |
| | | | ALHNHYTQKSLSLSPG | | |
| [symbol] 7 | DNA407 | Knob: hFc(N297A)- | DKTHTCPPCPAPELLGGPSVFLFPPKPKDTLMISRT | GGSGGSGGS | VPLSLY |
| | | [VPLSLY]-hIL12B- | PEVTCVVVDVSHEDPEVKFNWYVDGVEVHNAKTK | | |
| | | hIL12A | PREEQYASTYRVVSVLTVLHQDWLNGKEYKCKVSN | | |
| | | | KALPAPIEKTISKAKGQPREPQVYTLPPCRDELTKN | | |
| | | | QVSLWCLVKGFYPSDIAVEWESNGQPENNYKTTP | | |
| | | | PVLDSDGSFFLYSKLTVDKSRWQQGNVFSCSVMH | | |
| | | | EALHNHYTQKSLSLSPG | | |
| [symbol] 7 | DNA540 | Hole: hFc(N297A - | DKTHTCPPCPAPELLGGPSVFLFPPKPKDTLMISRT | GGSGGGSG | KIDACKRGDVTVKPSHVILLGSTVNITCSLKPRQGCFHYS [symbol] |
| | | IL12RB2(24-319) | PEVTCVVVDVSHEDPEVKFNWYVDGVEVHNAKTK | | LILYKFDRRINFHHGHSLNSQVTGLPLGTTLFVCKLACINS |
| | | | PREEQYASTYRVVSVLTVLHQDWLNGKEYKCKVSN | | CGAEIFVGVAPEQPQNLSCIQKGEQGTVACTWERGRDT |
| | | | KALPAPIEKTISKAKGQPREPQVCTLPPSRDELTKN | | EYTLQLSGPKNLTWQKQCKDIYCDYLDFGINLTPESPESN |
| | | | QVSLSCAVKGFYPSDIAVEWESNGQPENNYKTTPP | | VTAVNSLGSSSSLPSTFTFLDIVRPLPPWDIRIKFQKASVS [symbol] |
| | | | VLDSDGSFFLVSKLTVDKSRWQQGNVFSCSVMHE | | YWRDEGLVLLNRLRYRPSNSRLWNMVNVTKAKGRHDL |
| | | | ALHNHYTQKSLSLSPG | | PFTEYEFQISSKLHLYKGSWSDWSESLRAQTPEE |
| [symbol] 8 | DNA407 | Knob: hFc(N297A)- | DKTHTCPPCPAPELLGGPSVFLFPPKPKDTLMISRT | GGSGGSGGS | VPLSLY |
| | | [VPLSLY]-hIL12B- | PEVTCVVVDVSHEDPEVKFNWYVDGVEVHNAKTK | | |
| | | hIL12A | PREEQYASTYRVVSVLTVLHQDWLNGKEYKCKVSN | | |
| | | | KALPAPIEKTISKAKGQPREPQVYTLPPCRDELTKN | | |
| | | | QVSLWCLVKGFYPSDIAVEWESNGQPENNYKTTP | | |
| | | | PVLDSDGSFFLYSKLTVDKSRWQQGNVFSCSVMH | | |
| | | | EALHNHYTQKSLSLSPG | | |
| [symbol] 8 | DNA541 | Hole: hFC(N297A)- | DKTHTCPPCPAPELLGGPSVFLFPPKPKDTLMISRT | GGGGS | KIDACKRGDVTVKPSHVILLGSTVNITCSLKPRQGCFHYS [symbol] |
| | | IL12RB2(24-319) | PEVTCVVVDVSHEDPEVKFNWYVDGVEVHNAKTK | | LILYKFDRRINFHHGHSLNSQVTGLPLGTTLFVCKLACINS |
| | | | PREEQYASTYRVVSVLTVLHQDWLNGKEYKCKVSN | | CGAEIFVGVAPEQPQNLSCIQKGEQGTVACTWERGRDT |
| | | | KALPAPIEKTISKAKGQPREPQVCTLPPSRDELTKN | | EYTLQLSGPKNLTWQKQCKDIYCDYLDFGINLTPESPESN |
| | | | QVSLSCAVKGFYPSDIAVEWESNGQPENNYKTTPP | | VTAVNSLGSSSSLPSTFTFLDIVRPLPPWDIRIKFQKASVS [symbol] |
| | | | VLDSDGSFFLVSKLTVDKSRWQQGNVFSCSVMHE | | YWRDEGLVLLNRLRYRPSNSRLWNMVNVTKAKGRHDL |
| | | | ALHNHYTQKSLSLSPG | | PFTEYEFQISSKLHLYKGSWSDWSESLRAQTPEE |
| [symbol] 8 | DNA407 | Knob: hFc(N297A)- | DKTHTCPPCPAPELLGGPSVFLFPPKPKDTLMISRT | GGSGGSGGS | VPLSLY |
| | | [VPLSLY]-hIL12B- | PEVTCVVVDVSHEDPEVKFNWYVDGVEVHNAKTK | | |
| | | hIL12A | PREEQYASTYRVVSVLTVLHQDWLNGKEYKCKVSN | | |
| | | | KALPAPIEKTISKAKGQPREPQVYTLPPCRDELTKN | | |
| | | | QVSLWCLVKGFYPSDIAVEWESNGQPENNYKTTP | | |
| | | | PVLDSDGSFFLYSKLTVDKSRWQQGNVFSCSVMH | | |
| | | | EALHNHYTQKSLSLSPG | | |
| [symbol] 8 | DNA629 | Hole: hFc(N297A)- | DKTHTCPPCPAPELLGGPSVFLFPPKPKDTLMISRT | GGGGSGGGGS | KIDACKRGDVTVKPSHVILLGSTVNITCSLKPRQGCFHYS [symbol] |
| | | IL12RB2(24-212) | PEVTCVVVDVSHEDPEVKFNWYVDGVEVHNAKTK | | LILYKFDRRINFHHGHSLNSQVTGLPLGTTLFVCKLACINS |
| | | | PREEQYASTYRVVSVLTVLHQDWLNGKEYKCKVSN | | CGAEIFVGVAPEQPQNLSCIQKGEQGTVACTWERGRDT |
| | | | KALPAPIEKTISKAKGQPREPQVCTLPPSRDELTKN | | EYTLQLSGPKNLTWQKQCKDIYCDYLDFGINLTPESPESN |
| | | | QVSLSCAVKGFYPSDIAVEWESNGQPENNYKTTPP | | VTAVNSLGSSSSL |
| | | | VLDSDGSFFLVSKLTVDKSRWQQGNVFSCSVMHE | | |
| | | | ALHNHYTQKSLSLSPG | | |
| [symbol] 9 | DNA407 | Knob: hFc(N297A)- | DKTHTCPPCPAPELLGGPSVFLFPPKPKDTLMISRT | GGSGGSGGS | VPLSLY |
| | | [VPLSLY]-hIL12B | PEVTCVVVDVSHEDPEVKFNWYVDGVEVHNAKTK | | |
| | | hIL12A | PREEQYASTYRVVSVLTVLHQDWLNGKEYKCKVSN | | |
| | | | KALPAPIEKTISKAKGQPREPQVYTLPPCRDELTKN | | |
| | | | QVSLWCLVKGFYPSDIAVEWESNGQPENNYKTTP | | |
| | | | PVLDSDGSFFLYSKLTVDKSRWQQGNVFSCSVMH | | |
| | | | EALHNHYTQKSLSLSPG | | |
| [symbol] 9 | DNA644 | Hole: hFc(N297A - | DKTHTCPPCPAPELLGGPSVFLFPPKPKDTLMISRT | GGGGSGGGGS | KIDACKRGDVTVKPSHVILLGSTVNITCSLKPRQGCFHYS [symbol] |
| | | IL12RB2 24-227 | PEVTCVVVDVSHEDPEVKFNWYVDGVEVHNAKTK | | LILYKFDRRINFHHGHSLNSQVTGLPLGTTLFVCKLACINS |
| | | | PREEQYASTYRVVSVLTVLHQDWLNGKEYKCKVSN | | CGAEIFVGVAPEQPQNLSCIQKGEQGTVACTWERGRDT |
| | | | KALPAPIEKTISKAKGQPREPQVCTLPPSRDELTKN | | EYTLQLSGPKNLTWQKQCKDIYCDYLDFGINLTPESPESN |
| | | | QVSLSCAVKGFYPSDIAVEWESNGQPENNYKTTPP | | VTAVNSLGSSSSLPSTFTFLDIVRPLPP |
| | | | VLDSDGSFFLVSKLTVDKSRWQQGNVFSCSVMHE | | |
| | | | ALHNHYTOKSLSLSPG | | |

[symbol]

indicates data missing or illegible when filed

| [symbol] cule | name | newnames | Component4Sequence | IL-12 p40 subunit | Linker | IL-12 p35 subunit |
|---|---|---|---|---|---|---|
| [symbol] 0 | DNA406 | Knob: hFc(N297A)- | SGP | IWELKKDVYVVELDWYPDAPGEMVVLTCDTPEE | GGGGSGGGGS | RNLPVATPDPGMFPCLHHSQNLLRA |
| | | [VPLSLY]-hIL12B- | | DGITWTLDQSSEVLGSGKTLTIQVKEFGDAGQYT | GGGGS | VSNMLQKARQTLEFYPCTSEEIDHEDI |
| | | hIL12A | | CHKGGEVLSHSLLLLHKKEDGIWSTDILKDQKEPK | | TKDKTSTVEACLPLELTKNESCLNSRE |
| | | | | NKTFLRCEAKNYSGRFTCWWLTTISTDLTFSVKSS | | TSFITNGSCLASRKTSFMMALCLSSIYE |
| | | | | RGSSDPQGVTCGAATLSAERVRGDNKEYEYSVE | | DLKMYQVEFKTMNAKLLMDPKRQIF |
| | | | | CQEDSACPAAEESLPIEVMVDAVHKLKYENYTSS | | LDQNMLAVIDELMQALNFNSETVPQ |
| | | | | FFIRDIIKPDPPKNLQLKPLKNSRQVEVSWEYPDT | | KSSLEEPDFYKTKIKLCILLHAFRIRAVTI |
| | | | | WSTPHSYFSLTFCVQVQGKSKREKKDRVFTDKTS | | DRVMSYLNAS |
| | | | | ATVICRKNASISVRAQDRYYSSSWSEWASVPCS | | |
| [symbol] 0 | DNA409 | Hole: hFc(N297A)- | | | | |
| | | hCD212(24-545) | | | | |
| [symbol] 1 | DNA407 | Knob: hFc(N297A)- | SGP | IWELKKDVYVVELDWYPDAPGEMVVLTCDTPEE | GGGGSGGGGS | RNLPVATPDPGMFPCLHHSQNLLRA |
| | | [VPLSLY]-hIL12B- | | DGITWTLDQSSEVLGSGKTLTIQVKEFGDAGQYT | GGGGS | VSNMLQKARQTLEFYPCTSEEIDHEDI |
| | | hIL12A | | CHKGGEVLSHSLLLLHKKEDGIWSTDILKDQKEPK | | TKDKTSTVEACLPLELTKNESCLNSRE |
| | | | | NKTFLRCEAKNYSGRFTCWWLTTISTDLTFSVKSS | | TSFITNGSCLASRKTSFMMALCLSSIYE |
| | | | | RGSSDPQGVTCGAATLSAERVRGDNKEYEYSVE | | DLKMYQVEFKTMNAKLLMDPKRQIF |
| | | | | CQEDSACPAAEESLPIEVMVDAVHKLKYENYTSS | | LDQNMLAVIDELMQALNFNSETVPQ |
| | | | | FFIRDIIKPDPPKNLQLKPLKNSRQVEVSWEYPDT | | KSSLEEPDFYKTKIKLCILLHAFRIRAVTI |
| | | | | WSTPHSYFSLTFCVQVQGKSKREKKDRVFTDKTS | | DRVMSYLNAS |
| | | | | ATVICRKNASISVRAQDRYYSSSWSEWASVPCS | | |
| [symbol] 1 | DNA409 | Hole: hFc(N297A)- | | | | |
| | | hCD212(24-545) | | | | |
| [symbol] 3 | DNA407 | Knob: hFc(N297A)- | SGP | IWELKKDVYVVELDWYPDAPGEMVVLTCDTPEE | GGGGSGGGGS | RNLPVATPDPGMFPCLHHSQNLLRA |
| | | [VPLSLY]-hIL12B- | | DGITWTLDQSSEVLGSGKTLTIQVKEFGDAGQYT | GGGGS | VSNMLQKARQTLEFYPCTSEEIDHEDI |
| | | hIL12A | | CHKGGEVLSHSLLLLHKKEDGIWSTDILKDQKEPK | | TKDKTSTVEACLPLELTKNESCLNSRE |
| | | | | NKTFLRCEAKNYSGRFTCWWLTTISTDLTFSVKSS | | TSFITNGSCLASRKTSFMMALCLSSIYE |
| | | | | RGSSDPQGVTCGAATLSAERVRGDNKEYEYSVE | | DLKMYQVEFKTMNAKLLMDPKRQIF |
| | | | | CQEDSACPAAEESLPIEVMVDAVHKLKYENYTSS | | LDQNMLAVIDELMQALNFNSETVPQ |
| | | | | FFIRDIIKPDPPKNLQLKPLKNSRQVEVSWEYPDT | | KSSLEEPDFYKTKIKLCILLHAFRIRAVTI |
| | | | | WSTPHSYFSLTFCVQVQGKSKREKKDRVFTDKTS | | DRVMSYLNAS |
| | | | | ATVICRKNASISVRAQDRYYSSSWSEWASVPCS | | |
| [symbol] 3 | DNA425 | Hole: hFc(N297A)- | | | | |
| | | IL12R82(24-622) | | | | |
| [symbol] 4 | DNA407 | Knob: hFc(N297A)- | SGP | IWELKKDVYVVELDWYPDAPGEMVVLTCDTPEE | GGGGSGGGGS | RNLPVATPDPGMFPCLHHSQNLLRA |
| | | [VPLSLY]-hIL12B- | | DGITWTLDQSSEVLGSGKTLTIQVKEFGDAGQYT | GGGGS | VSNMLQKARQTLEFYPCTSEEIDHEDI |
| | | hIL12A | | CHKGGEVLSHSLLLLHKKEDGIWSTDILKDOKEPK | | TKDKTSTVEACLPLELTKNESCLNSRE |
| | | | | NKTFLRCEAKNYSGRFTCWWLTTISTDLTFSVKSS | | TSFITNGSCLASRKTSFMMALCLSSIYE |
| | | | | RGSSDPQGVTCGAATLSAERVRGDNKEYEYSVE | | DLKMYQVEFKTMNAKLLMDPKRQIF |
| | | | | CQEDSACPAAEESLPIEVMVDAVHKLKYENYTSS | | LDQNMLAVIDELMOALNFNSETVPQ |
| | | | | FFIRDIIKPDPPKNLQLKPLKNSRQVEVSWEYPDT | | KSSLEEPDFYKTKIKLCILLHAFRIRAVTI |
| | | | | WSTPHSYFSLTFCVQVQGKSKREKKDRVFTDKTS | | DRVMSYLNAS |
| | | | | ATVICRKNASISVRAQDRYYSSSWSEWASVPCS | | |
| [symbol] 4 | DNA410 | Hole: hFc(N297A)- | | | | |
| | | hCD212(24-237) | | | | |
| [symbol] 5 | DNA407 | Knob: hFc(N297A)- | SGP | IWELKKDVYVVELDWYPDAPGEMVVLTCDTPEE | GGGGSGGGGS | RNLPVATPDPGMFPCLHHSQNLLRA |
| | | [VPLSLY]-hIL12B- | | DGITWTLDQSSEVLGSGKTLTIQVKEFGDAGQYT | GGGGS | VSNMLQKARQTLEFYPCTSEEIDHEDI |
| | | hIL12A | | CHKGGEVLSHSLLLLHKKEDGIWSTDILKDQKEPK | | TKDKTSTVEACLPLELTKNESCLNSRE |
| | | | | NKTFLRCEAKNYSGRFTCWWLTTISTDLTFSVKSS | | TSFITNGSCLASRKTSFMMALCLSSIYE |
| | | | | RGSSDPQGVTCGAATLSAERVRGDNKEYEYSVE | | DLKMYQVEFKTMNAKLLMDPKRQIF |
| | | | | CQEDSACPAAEESLPIEVMVDAVHKLKYENYTSS | | LDQNMLAViDELMQALNFNSETVPQ |
| | | | | FFIRDIIKPDPPKNLQLKPLKNSRQVEVSWEYPDT | | KSSLEEPDFYKTKIKLCILLHAFRIRAVTI |
| | | | | WSTPHSYFSLTFCVQVQGKSKREKKDRVFTDKTS | | DRVMSYLNAS |
| | | | | ATVICRKNASISVRAQDRYYSSSWSEWASVPCS | | |
| [symbol] 5 | 0 DNA426 | Hole: hFc(N297A)- | | | | |
| | | IL12RB2(24-319) | | | | |
| [symbol] 4 | DNA406 | Knob: hFc(N297A)- | SGP | IWELKKDVYVVELDWYPDAPGEMVVLTCDTPEE | GGGGSGGGGS | RNLPVATPDPGMFPCLHHSQNLLRA |
| | | [VPLSLY]-hIL12B- | | DGITWTLDQSSEVLGSGKTLTIQVKEFGDAGQYT | GGGGS | VSNMLQKARQTLEFYPCTSEEIDHEDI |
| | | hIL12A | | CHKGGEVLSHSLLLLHKKEDGIWSTDILKDQKEPK | | TKDKTSTVEACLPLELTKNESCLNSRE |
| | | | | NKTFLRCEAKNYSGRFTCWWLTTISTDLTFSVKSS | | TSFITNGSCLASRKTSFMMALCLSSIYE |
| | | | | RGSSDPQGVTCGAATLSAERVRGDNKEYEYSVE | | DLKMYQVEFKTMNAKLLMDPKRQIF |
| | | | | CQEDSACPAAEESLPIEVMVDAVHKLKYENYTSS | | LDQNMLAVIDELMQALNFNSETVPQ |
| | | | | FFIRDIIKPDPPKNLQLKPLKNSRQVEVSWEYPDT | | KSSLEEPDFYKTKIKLCILLHAFRIRAVTI |
| | | | | WSTPHSYFSLTFCVQVQGKSKREKKDRVFTDKTS | | DRVMSYLNAS |
| | | | | ATVICRKNASISVRAQDRYYSSSWSEWASVPCS | | |
| [symbol] 4 | DNA426 | Hole: hFc(N297A)- | | | | |
| | | IL12RB2(24-319) | | | | |
| [symbol] 5 | DNA407 | Knob: hFc(N297A)- | SGP | IWELKKDVYVVELDWYPDAPGEMVVLTCDTPEE | GGGGSGGGGS | RNLPVATPDPGMFPCLHHSQNLLRA |
| | | [VPLSLY]-hIL12B- | | DGITWTLDQSSEVLGSGKTLTIQVKEFGDAGQYT | GGGGS | VSNMLQKARQTLEFYPCTSEEIDHEDI |
| | | hIL12A | | CHKGGEVLSHSLLLLHKKEDGIWSTDILKDQKEPK | | TKDKTSTVEACLPLELTKNESCLNSRE |
| | | | | NKTFLRCEAKNYSGRFTCWWLTTISTDLTFSVKSS | | TSFITNGSCLASRKTSFMMALCLSSIYE |
| | | | | RGSSDPQGVTCGAATLSAERVRGDNKEYEYSVE | | DLKMYQVEFKTMNAKLLMDPKRQIF |
| | | | | CQEDSACPAAEESLPIEVMVDAVHKLKYENYTSS | | LDQNMLAVIDELMOALNFNSETVPQ |
| | | | | FFIRDIIKPDPPKNLQLKPLKNSRQVEVSWEYPDT | | KSSLEEPDFYKTKIKLCILLHAFRIRAVTI |
| | | | | WSTPHSYFSLTFCVQVQGKSKREKKDRVFTDKTS | | DRVMSYLNAS |
| | | | | ATVICRKNASISVRAQDRYYSSSWSEWASVPCS | | |
| [symbol] 5 | DNA539 | Hole: hFc(N297A)- | | | | |
| | | IL12R82(24-222) | | | | |
| [symbol] 7 | DNA407 | Knob: hFc(N297A)- | SGP | IWELKKDVYVVELDWYPDAPGEMVVLTCDTPEE | GGGGSGGGGS | RNLPVATPDPGMFPCLHHSQNLLRA |
| | | [VPLSLY]-hIL12B- | | DGITWTLDQSSEVLGSGKTLTIQVKEFGDAGQYT | GGGGS | VSNMLQKARQTLEFYPCTSEEIDHEDI |
| | | hIL12A | | CHKGGEVLSHSLLLLHKKEDGIWSTDILKDQKEPK | | TKDKTSTVEACLPLELTKNESCLNSRE |
| | | | | NKTFLRCEAKNYSGRFTCWWLTTISTDLTFSVKSS | | TSFITNGSCLASRKTSFMMALCLSSIYE |
| | | | | RGSSDPQGVTCGAATLSAERVRGDNKEYEYSVE | | DLKMYQVEFKTMNAKLLMDPKRQIF |
| | | | | CQEDSACPAAEESLPIEVMVDAVHKLKYENYTSS | | LDQNMLAVIDELMQALNFNSETVPQ |
| | | | | FFIRDIIKPDPPKNLQLKPLKNSRQVEVSWEYPDT | | KSSLEEPDFYKTKIKLCILLHAFRIRAVTI |
| | | | | WSTPHSYFSLTFCVQVQGKSKREKKDRVFTDKTS | | DRVMSYLNAS |
| | | | | ATVICRKNASISVRAQDRYYSSSWSEWASVPCS | | |
| [symbol] 7 | DNA540 | Hole: hFc(N297A)- | | | | |
| | | IL12RB2(24-319) | | | | |
| [symbol] 8 | DNA407 | Knob: hFc(N297A)- | SGP | IWELKKDVYVVELDWYPDAPGEMVVLTCDTPEE | GGGGSGGGGS | RNLPVATPDPGMFPCLHHSQNLLRA |
| | | [VPLSLY]-hIL12B- | | DGITWTLDQSSEVLGSGKTLTIQVKEFGDAGQYT | GGGGS | VSNMLQKARQTLEFYPCTSEEIDHEDI |
| | | hIL12A | | CHKGGEVLSHSLLLLHKKEDGIWSTDILKDQKEPK | | TKDKTSTVEACLPLELTKNESCLNSRE |
| | | | | NKTFLRCEAKNYSGRFTCWWLTTISTDLTFSVKSS | | TSFITNGSCLASRKTSFMMALCLSSIYE |
| | | | | RGSSDPQGVTCGAATLSAERVRGDNKEYEYSVE | | DLKMYQVEFKTMNAKLLMDPKRQIF |
| | | | | CQEDSACPAAEESLPIEVMVDAVHKLKYENYTSS | | LDQNMLAVIDELMQALNFNSETVPQ |
| | | | | FFIRDIIKPDPPKNLQLKPLKNSRQVEVSWEYPDT | | KSSLEEPDFYKTKIKLCILLHAFRIRAVTI |
| | | | | WSTPHSYFSLTFCVQVQGKSKREKKDRVFTDKTS | | DRVMSYLNAS |
| | | | | ATVICRKNASISVRAQDRYYSSSWSEWASVPCS | | |
| [symbol] 8 | DNA541 | Hole: hFc(N297A)- | | | | |
| | | IL12RB2(24-319) | | | | |
| [symbol] 8 | DNA407 | Knob: hFc(N297A)- | SGP | IWELKKDVYVVELDWYPDAPGEMVVLTCDTPEE | GGGGSGGGGS | RNLPVATPDPGMFPCLHHSQNLLRA |
| | | [VPLSLY]-hIL12B- | | DGITWTLDQSSEVLGSGKTLTIQVKEFGDAGQYT | GGGGS | VSNMLQKARQTLEFYPCTSEEIDHEDI |
| | | hIL12A | | CHKGGEVLSHSLLLLHKKEDGIWSTDILKDOKEPK | | TKDKTSTVEACLPLELTKNESCLNSRE |
| | | | | NKTFLRCEAKNYSGRFTCWWLTTISTDLTFSVKSS | | TSFITNGSCLASRKTSFMMALCLSSIYE |
| | | | | RGSSDPQGVTCGAATLSAERVRGDNKEYEYSVE | | DLKMYQVEFKTMNAKLLMDPKRQIF |
| | | | | CQEDSACPAAEESLPIEVMVDAVHKLKYENYTSS | | LDQNMLAVIDELMOALNFNSETVPQ |
| | | | | FFIRDIIKPDPPKNLQLKPLKNSRQVEVSWEYPDT | | KSSLEEPDFYKTKIKLCILLHAFRIRAVTI |
| | | | | WSTPHSYFSLTFCVQVQGKSKREKKDRVFTDKTS | | DRVMSYLNAS |
| | | | | ATVICRKNASISVRAQDRYYSSSWSEWASVPCS | | |
| [symbol] 8 | DNA629 | Hole: hFc(N297A)- | | | | |
| | | IL12RB2(24-212) | | | | |
| [symbol] 9 | DNA407 | Knob: hFc(N297A)- | SGP | IWELKKDVYVVELDWYPDAPGEMVVLTCDTPEE | GGGGSGGGGS | RNLPVATPDPGMFPCLHHSQNLLRA |
| | | [VPLSLY]-hIL12B- | | DGITWTLDQSSEVLGSGKTLTIOVKEFGDAGQYT | GGGGS | VSNMLQKARQTLEFYPCTSEEIDHEDI |
| | | hIL12A | | CHKGGEVLSHSLLLLHKKEDGIWSTDILKDQKEPK | | TKDKTSTVEACLPLELTKNESCLNSRE |
| | | | | NKTFLRCEAKNYSGRFTCWWLTTISTDLTFSVKSS | | TSFITNGSCLASRKTSFMMALCLSSIYE |
| | | | | RGSSDPQGVTCGAATLSAERVRGDNKEYEYSVE | | DLKMYQVEFKTMNAKLLMDPKRQIF |
| | | | | CQEDSACPAAEESLPIEVMVDAVHKLKYENYTSS | | LDQNMLAVIDELMQALNFNSETVPQ |
| | | | | FFIRDIIKPDPPKNLQLKPLKNSRQVEVSWEYPDT | | KSSLEEPDFYKTKIKLCILLHAFRIRAVTI |
| | | | | WSTPHSYFSLTFCVQVQGKSKREKKDRVFTDKTS | | DRVMSYLNAS |
| | | | | ATVICRKNASISVRAQDRYYSSSWSEWASVPCS | | |
| [symbol] 9 | DNA644 | Hole: hFc(N297A)- | | | | |
| | | IL12RB2(24-227) | | | | |

[symbol]

indicates data missing or illegible when filed

| [symbol] cule | name | newnames | Released by cleavage |
|---|---|---|---|
| [symbol] | DNA406 | Knob: hFc(N297A)- | LYSGPIWELKKDVYVVELDWYPDAPGEMVVLTCDTPEEDGITWTLDQSSEVLGSGKTLTIQVKEFGDAG |
| | | [VPLSLY]-hIL12B- | QYTCHKGGEVLSHSLLLLHKKEDGIWSTDILKDQKEPKNKTFLRCEAKNYSGRFTCWWLTTISTDLTFS |
| | | hIL12A | VKSSRGSSDPQGVTCGAATLSAERVRGDNKEYEYSVECQEDSACPAAEESLPIEVMVDAVHKLKYENYT |
| | | | SSFFIRDIIKPDPPKNLQLKPLKNSRQVEVSWEYPDTWSTPHSYFSLTFCVQVQGKSKREKKDRVFTDK |
| | | | TSATVICRKNASISVRAQDRYYSSSWSEWASVPCSGGGGSGGGGSGGGGSRNLPVATPDPGMFPCLHHS |
| | | | QNLLRAVSNMLQKARQTLEFYPCTSEEIDHEDITKDKTSTVEACLPLELTKNESCLNSRETSFITNGSC |
| | | | LASRKTSFMMALCLSSIYEDLKMYQVEFKTMNAKLLMDPKRQIFLDQNMLAVIDELMQALNFNSETVPQ |
| | | | KSSLEEPDFYKTKIKLCILLHAFRIRAVTIDRVMSYLNAS |
| [symbol] | DNA409 | Hole: hFc(N297A)- | |
| | | hCD212(24-545) | |
| [symbol] | DNA407 | Knob: hFc(N297A)- | LYSGPIWELKKDVYVVELDWYPDAPGEMVVLTCDTPEEDGITWTLDQSSEVLGSGKTLTIQVKEFGDAG |
| | | [VPLSLY]-hIL12B- | QYTCHKGGEVLSHSLLLLHKKEDGIWSTDILKDQKEPKNKTFLRCEAKNYSGRFTCWWLTTISTDLTFS |
| | | hIL12A | VKSSRGSSDPQGVTCGAATLSAERVRGDNKEYEYSVECQEDSACPAAEESLPIEVMVDAVHKLKYENYT |
| | | | SSFFIRDIIKPDPPKNLQLKPLKNSRQVEVSWEYPDTWSTPHSYFSLTFCVQVQGKSKREKKDRVFTDK |
| | | | TSATVICRKNASiSVRAQDRYYSSSWSEWASVPCSGGGGSGGGGSGGGGSRNLPVATPDPGMFPCLHHS |
| | | | QNLLRAVSNMLQKARQTLEFYPCTSEEIDHEDITKDKTSTVEACLPLELTKNESCLNSRETSFITNGSC |
| | | | LASRKTSFMMALCLSSIYEDLKMYQVEFKTMNAKLLMDPKRQIFLDQNMLAVIDELMQALNFNSETVPQ |
| | | | KSSLEEPDFYKTKIKLCILLHAFRIRAVTIDRVMSYLNAS |
| [symbol] | DNA409 | Hole: hFc(N297A)- | |
| | | hCD212(24-545) | |
| [symbol] | DNA407 | Knob: hFc(N297A)- | LYSGPIWELKKDVYVVELDWYPDAPGEMVVLTCDTPEEDGITWTLDQSSEVLGSGKTLTIQVKEFGDAG |
| | | [VPLSLY]-hIL12B- | QYTCHKGGEVLSHSLLLLHKKEDGIWSTDILKDQKEPKNKTFLRCEAKNYSGRFTCWWLTTISTDLTFS |
| | | hIL12A | VKSSRGSSDPOGVTCGAATLSAERVRGDNKEYEYSVECQEDSACPAAEESLPIEVMVDAVHKLKYENYT |
| | | | SSFFIRDIIKPDPPKNLQLKPLKNSRQVEVSWEYPDTWSTPHSYFSLTFCVQVQGKSKREKKDRVFTDK |
| | | | TSATVICRKNASISVRAQDRYYSSSWSEWASVPCSGGGGSGGGGSGGGGSRNLPVATPDPGMFPCLHHS |
| | | | QNLLRAVSNMLQKARQTLEFYPCTSEEIDHEDITKDKTSTVEACLPLELTKNESCLNSRETSFITNGSC |
| | | | LASRKTSFMMALCLSSIYEDLKMYQVEFKTMNAKLLMDPKRQIFLDQNMLAVIDELMQALNFNSETVPQ |
| | | | KSSLEEPDFYKTKIKLCILLHAFRIRAVTIDRVMSYLNAS |
| [symbol] | DNA425 | Hole: hFc(N297A)- | |
| | | IL12RB2(24-622) | |
| [symbol] | DNA407 | Knob: hFc(N297A)- | LYSGPIWELKKDVYVVELDWYPDAPGEMVVLTCDTPEEDGITWTLDQSSEVLGSGKTLTIQVKEFGDAG |
| | | [VPLSLY]-hIL12B- | QYTCHKGGEVLSHSLLLLHKKEDGIWSTDILKDQKEPKNKTFLRCEAKNYSGRFTCWWLTTISTDLTFS |
| | | hIL12A | VKSSRGSSDPQGVTCGAATLSAERVRGDNKEYEYSVECQEDSACPAAEESLPIEVMVDAVHKLKYENYT |
| | | | SSFFIRDIIKPDPPKNLQLKPLKNSRQVEVSWEYPDTWSTPHSYFSLTFCVQVQGKSKREKKDRVFTDK |
| | | | TSATVICRKNASISVRAQDRYYSSSWSEWASVPCSGGGGSGGGGSGGGGSRNLPVATPDPGMFPCLHHS |
| | | | QNLLRAVSNMLQKARQTLEFYPCTSEEIDHEDITKDKTSTVEACLPLELTKNESCLNSRETSFITNGSC |
| | | | LASRKTSFMMALCLSSIYEDLKMYQVEFKTMNAKLLMDPKRQIFLDQNMLAVIDELMQALNFNSETVPQ |
| | | | KSSLEEPDFYKTKIKLCILLHAFRIRAVTIDRVMSYLNAS |
| [symbol] | DNA410 | Hole: hFc(N297A)- | |
| | | hCD212(24-237) | |
| [symbol] | DNA407 | Knob: hFc(N297A)- | LYSGPIWELKKDVYVVELDWYPDAPGEMVVLTCDTPEEDGITWTLDQSSEVLGSGKTLTIQVKEFGDAG |
| | | [VPLSLY]-hIL12B- | QYTCHKGGEVLSHSLLLLHKKEDGIWSTDILKDQKEPKNKTFLRCEAKNYSGRFTCWWLTTISTDLTFS |
| | | hIL12A | VKSSRGSSDPQGVTCGAATLSAERVRGDNKEYEYSVECQEDSACPAAEESLPIEVMVDAVHKLKYENYT |
| | | | SSFFIRDIIKPDPPKNLQLKPLKNSRQVEVSWEYPDTWSTPHSYFSLTFCVQVQGKSKREKKDRVFTDK |
| | | | TSATVICRKNASISVRAQDRYYSSSWSEWASVPCSGGGGSGGGGSGGGGSRNLPVATPDPGMFPCLHHS |
| | | | QNLLRAVSNMLQKARQTLEFYPCTSEEIDHEDITKDKTSTVEACLPLELTKNESCLNSRETSFITNGSC |
| | | | LASRKTSFMMALCLSSiYEDLKMYQVEFKTMNAKLLMDPKRQIFLDQNMLAVIDELMQALNFNSETVPQ |
| | | | KSSLEEPDFYKTKIKLCILLHAFRIRAVTIDRVMSYLNAS |
| [symbol] | DNA426 | Hole: hFc (N297A- | |
| | | IL12RB2(24-319) | |
| [symbol] | DNA406 | Knob: hFc(N297A)- | LYSGPIWELKKDVYVVELDWYPDAPGEMVVLTCDTPEEDGITWTLDQSSEVLGSGKTLTIQVKEFGDAG |
| | | [VPLSLY]-hIL12B- | QYTCHKGGEVLSHSLLLLHKKEDGIWSTDILKDQKEPKNKTFLRCEAKNYSGRFTCWWLTTISTDLTFS |
| | | hIL12A | VKSSRGSSDPQGVTCGAATLSAERVRGDNKEYEYSVECQEDSACPAAEESLPIEVMVDAVHKLKYENYT |
| | | | SSFFIRDIIKPDPPKNLQLKPLKNSRQVEVSWEYPDTWSTPHSYFSLTFCVQVQGKSKREKKDRVFTDK |
| | | | TSATVICRKNASISVRAQDRYYSSSWSEWASVPCSGGGGSGGGGSGGGGSRNLPVATPDPGMFPCLHHS |
| | | | QNLLRAVSNMLQKARQTLEFYPCTSEEIDHEDITKDKTSTVEACLPLELTKNESCLNSRETSFITNGSC |
| | | | LASRKTSFMMALCLSSiYEDLKMYQVEFKTMNAKLLMDPKRQIFLDQNMLAVIDELMQALNFNSETVPQ |
| | | | KSSLEEPDFYKTKIKLCILLHAFRIRAVTIDRVMSYLNAS |
| [symbol] | DNA426 | Hole: hFc(N297A)- | |
| | | IL12RB2(24-319) | |
| [symbol] | DNA407 | Knob: hFc(N297A)- | LYSGPIWELKKDVYVVELDWYPDAPGEMVVLTCDTPEEDGITWTLDQSSEVLGSGKTLTIQVKEFGDAG |
| | | [VPLSLY]-hIL12B- | QYTCHKGGEVLSHSLLLLHKKEDGIWSTDILKDQKEPKNKTFLRCEAKNYSGRFTCWWLTTISTDLTFS |
| | | hIL12A | VKSSRGSSDPQGVTCGAATLSAERVRGDNKEYEYSVECQEDSACPAAEESLPIEVMVDAVHKLKYENYT |
| | | | SSFFIRDIIKPDPPKNLQLKPLKNSRQVEVSWEYPDTWSTPHSYFSLTFCVQVQGKSKREKKDRVFTDK |
| | | | TSATVICRKNASISVRAQDRYYSSSWSEWASVPCSGGGGSGGGGSGGGGSRNLPVATPDPGMFPCLHHS |
| | | | QNLLRAVSNMLQKARQTLEFYPCTSEEIDHEDITKDKTSTVEACLPLELTKNESCLNSRETSFITNGSC |
| | | | LASRKTSFMMALCLSSIYEDLKMYQVEFKTMNAKLLMDPKRQIFLDQNMLAVIDELMQALNFNSETVPQ |
| | | | KSSLEEPDFYKTKIKLCILLHAFRIRAVTIDRVMSYLNAS |
| [symbol] | DNA539 | Hole: hFc(N297A)- | |
| | | IL12RB2(24-222) | |
| [symbol] | DNA407 | Knob: hFc(N297A)- | LYSGPIWELKKDVYVVELDWYPDAPGEMVVLTCDTPEEDGITWTLDQSSEVLGSGKTLTIQVKEFGDAG |
| | | [VPLSLY]-hIL12B- | QYTCHKGGEVLSHSLLLLHKKEDGIWSTDILKDQKEPKNKTFLRCEAKNYSGRFTCWWLTTISTDLTFS |
| | | hIL12A | VKSSRGSSDPQGVTCGAATLSAERVRGDNKEYEYSVECQEDSACPAAEESLPIEVMVDAVHKLKYENYT |
| | | | SSFFIRDIIKPDPPKNLQLKPLKNSRQVEVSWEYPDTWSTPHSYFSLTFCVQVQGKSKREKKDRVFTDK |
| | | | TSATVICRKNASISVRAQDRYYSSSWSEWASVPCSGGGGSGGGGSGGGGSRNLPVATPDPGMFPCLHHS |
| | | | QNLLRAVSNMLQKARQTLEFYPCTSEEIDHEDITKDKTSTVEACLPLELTKNESCLNSRETSFITNGSC |
| | | | LASRKTSFMMALCLSSIYEDLKMYQVEFKTMNAKLLMDPKRQIFLDQNMLAVIDELMQALNFNSETVPQ |
| | | | KSSLEEPDFYKTKIKLCILLHAFRIRAVTIDRVMSYLNAS |
| [symbol] | DNA540 | Hole: hFc(N297A)- | |
| | | IL12RB2(24-319) | |
| [symbol] | DNA407 | Knob: hFc(N297A)- | LYSGPIWELKKDVYVVELDWYPDAPGEMVVLTCDTPEEDGITWTLDQSSEVLGSGKTLTIQVKEFGDAG |
| | | [VPLSLY]-hIL12B- | QYTCHKGGEVLSHSLLLLHKKEDGIWSTDILKDQKEPKNKTFLRCEAKNYSGRFTCWWLTTISTDLTFS |
| | | hIL12A | VKSSRGSSDPQGVTCGAATLSAERVRGDNKEYEYSVECQEDSACPAAEESLPIEVMVDAVHKLKYENYT |
| | | | SSFFIRDIIKPDPPKNLQLKPLKNSRQVEVSWEYPDTWSTPHSYFSLTFCVQVQGKSKREKKDRVFTDK |
| | | | TSATVICRKNASiSVRAQDRYYSSSWSEWASVPCSGGGGSGGGGSGGGGSRNLPVATPDPGMFPCLHHS |
| | | | QNLLRAVSNMLQKARQTLEFYPCTSEEIDHEDITKDKTSTVEACLPLELTKNESCLNSRETSFITNGSC |
| | | | LASRKTSFMMALCLSSIYEDLKMYQVEFKTMNAKLLMDPKRQIFLDQNMLAVIDELMQALNFNSETVPQ |
| | | | KSSLEEPDFYKTKIKLCILLHAFRIRAVTIDRVMSYLNAS |
| [symbol] | DNA541 | Hole: hFc(N297A)- | |
| | | IL12RB2(24-319) | |
| [symbol] | DNA407 | Knob: hFc(N297A)- | LYSGPIWELKKDVYVVELDWYPDAPGEMVVLTCDTPEEDGITWTLDQSSEVLGSGKTLTIQVKEFGDAG |
| | | [VPLSLY]-hIL12B- | QYTCHKGGEVLSHSLLLLHKKEDGIWSTDILKDQKEPKNKTFLRCEAKNYSGRFTCWWLTTISTDLTFS |
| | | hIL12A | VKSSRGSSDPQGVTCGAATLSAERVRGDNKEYEYSVECQEDSACPAAEESLPIEVMVDAVHKLKYENYT |
| | | | SSFFIRDIIKPDPPKNLQLKPLKNSRQVEVSWEYPDTWSTPHSYFSLTFCVQVQGKSKREKKDRVFTDK |
| | | | TSATVICRKNASISVRAQDRYYSSSWSEWASVPCSGGGGSGGGGSGGGGSRNLPVATPDPGMFPCLHHS |
| | | | QNLLRAVSNMLQKARQTLEFYPCTSEEIDHEDITKDKTSTVEACLPLELTKNESCLNSRETSFITNGSC |
| | | | LASRKTSFMMALCLSSIYEDLKMYQVEFKTMNAKLLMDPKRQIFLDQNMLAVIDELMQALNFNSETVPQ |
| | | | KSSLEEPDFYKTKIKLCILLHAFRIRAVTIDRVMSYLNAS |
| [symbol] | DNA629 | Hole: hFc(N297A)- | |
| | | IL12RB2(24-212) | |
| [symbol] | DNA407 | Knob: hFc(N297A)- | LYSGPIWELKKDVYVVELDWYPDAPGEMVVLTCDTPEEDGITWTLDQSSEVLGSGKTLTIQVKEFGDAG |
| | | [VPLSLY]-hIL12B- | QYTCHKGGEVLSHSLLLLHKKEDGIWSTDILKDQKEPKNKTFLRCEAKNYSGRFTCWWLTTISTDLTFS |
| | | hIL12A | VKSSRGSSDPQGVTCGAATLSAERVRGDNKEYEYSVECQEDSACPAAEESLPIEVMVDAVHKLKYENYT |
| | | | SSFFIRDIIKPDPPKNLQLKPLKNSRQVEVSWEYPDTWSTPHSYFSLTFCVQVQGKSKREKKDRVFTDK |
| | | | TSATVICRKNASiSVRAQDRYYSSSWSEWASVPCSGGGGSGGGGSGGGGSRNLPVATPDPGMFPCLHHS |
| | | | QNLLRAVSNMLQKARQTLEFYPCTSEEIDHEDITKDKTSTVEACLPLELTKNESCLNSRETSFiTNGSC |
| | | | LASRKTSFMMALCLSSIYEDLKMYQVEFKTMNAKLLMDPKRQIFLDQNMLAVIDELMQALNFNSETVPQ |
| | | | KSSLEEPDFYKTKIKLCILLHAFRIRAVTIDRVMSYLNAS |
| [symbol] | DNA644 | Hole: hFc(N297A) | |
| | | IL12RB2(24-227) | |

[symbol]

indicates data missing or illegible when filed

| [symbol] cule | name | newnames | FullSequence |
|---|---|---|---|
| [symbol] | DNA406 | Knob: hFc(N297A)- | DKTHTCPPCPAPELLGGPSVFLFPPKPKDTLMISRTPEVTCVVVDVSHEDPEVKFNWYVDGVEVHNAKTK |
| | | [VPLSLY]-hIL12B- | PREEQYASTYRVVSVLTVLHQDWLNGKEYKCKVSNKALPAPIEKTISKAKGQPREPQVYTLPPCRDELTK |
| | | hIL12A | NQVSLWCLVKGFYPSDIAVEWESNGQPENNYKTTPPVLDSDGSFFLYSKLTVDKSRWQQGNVFSCSVMHE |
| | | | ALHNHYTQKSLSLSPGGGSGGSVPLSLYSGPIWELKKDVYVVELDWYPDAPGEMVVLTCDTPEEDGITWT |
| | | | LDQSSEVLGSGKTLTIQVKEFGDAGQYTCHKGGEVLSHSLLLLHKKEDGIWSTDILKDQKEPKNKTFLRC |
| | | | EAKNYSGRFTCWWLTTISTDLTFSVKSSRGSSDPQGVTCGAATLSAERVRGDNKEYEYSVECQEDSACPA |
| | | | AEESLPIEVMVDAVHKLKYENYTSSFFIRDIIKPDPPKNLQLKPLKNSRQVEVSWEYPDTWSTPHSYFSL |
| | | | TFCVQVQGKSKREKKDRVFTDKTSATVICRKNASISVRAQDRYYSSSWSEWASVPCSGGGGSGGGGSGGG |
| | | | GSRNLPVATPDPGMFPCLHHSQNLLRAVSNMLQKARQTLEFYPCTSEEIDHEDITKDKTSTVEACLPLEL |
| | | | TKNESCLNSRETSFITNGSCLASRKTSFMMALCLSSIYEDLKMYQVEFKTMNAKLLMDPKRQIFLDQNML |
| | | | AVIDELMQALNFNSETVPQKSSLEEPDFYKTKIKLCILLHAFRIRAVTIDRVMSYLNAS |
| [symbol] | DNA409 | Hole: hFc(N297A)- | DKTHTCPPCPAPELLGGPSVFLFPPKPKDTLMISRTPEVTCVVVDVSHEDPEVKFNWYVDGVEVHNAKTK |
| | | hCD212(24-545) | PREEQYASTYRVVSVLTVLHQDWLNGKEYKCKVSNKALPAPIEKTISKAKGQPREPQVCTLPPSRDELTK |
| | | | NQVSLSCAVKGFYPSDIAVEWESNGQPENNYKTTPPVLDSDGSFFLVSKLTVDKSRWQQGNVFSCSVMHE |
| | | | ALHNHYTQKSLSLSPGGGGGSGGGGSCRTSECCFQDPPYPDADSGSASGPRDLRCYRISSDRYECSWQYE |
| | | | GPTAGVSHFLRCCLSSGRCCYFAAGSATRLQFSDQAGVSVLYTVTLWVESWARNQTEKSPEVTLQLYNSV |
| | | | KYEPPLGDIKVSKLAGQLRMEWETPDNQVGAEVQFRHRTPSSPWKLGDCGPQDDDTESCLCPLEMNVAQE |
| | | | FQLRRRQLGSQGSSWSKWSSPVCVPPENPPQPQVRFSVEQLGQDGRRRLTLKEQPTQLELPEGCQGLAPG |
| | | | TEVTYRLQLHMLSCPCKAKATRTLHLGKMPYLSGAAYNVAVISSNQFGPGLNQTWHIPADTHTEPVALNI |
| | | | SVGTNGTTMYWPARAQSMTYCIEWQPVGQDGGLATCSLTAPQDPDPAGMATYSWSRESGAMGQEKCYYIT |
| | | | IFASAHPEKLTLWSTVLSTYHFGGNASAAGTPHHVSVKNHSLDSVSVDWAPSLLSTCPGVLKEYVVRCRD |
| | | | EDSKQVSEHPVQPTETQVTLSGLRAGVAYTVQVRADTAWLRGVWSQPQRFSIEVQVSD |
| [symbol] | DNA407 | Knob: hFc(N297A)- | DKTHTCPPCPAPELLGGPSVFLFPPKPKDTLMISRTPEVTCVVVDVSHEDPEVKFNWYVDGVEVHNAKTK |
| | | [VPLSLY]-hIL12B- | PREEQYASTYRVVSVLTVLHQDWLNGKEYKCKVSNKALPAPIEKTISKAKGQPREPQVYTLPPCRDELTK |
| | | hIL12A | NQVSLWCLVKGFYPSDIAVEWESNGQPENNYKTTPPVLDSDGSFFLYSKLTVDKSRWQQGNVFSCSVMHE |
| | | | ALHNHYTQKSLSLSPGGGSGGSGGSVPLSLYSGPIWELKKDVYVVELDWYPDAPGEMWLTCDTPEEDGIT |
| | | | WTLDQSSEVLGSGKTLTIQVKEFGDAGQYTCHKGGEVLSHSLLLLHKKEDGIWSTDILKDQKEPKNKTFL |
| | | | RCEAKNYSGRFTCWWLTTISTDLTFSVKSSRGSSDPQGVTCGAATLSAERVRGDNKEYEYSVECQEDSAC |
| | | | PAAEESLPIEVMVDAVHKLKYENYTSSFFIRDIIKPDPPKNLQLKPLKNSRQVEVSWEYPDTWSTPHSYF |
| | | | SLTFCVQVQGKSKREKKDRVFTDKTSATVICRKNASISVRAQDRYYSSSWSEWASVPCSGGGGSGGGGSG |
| | | | GGGSRNLPVATPDPGMFPCLHHSQNLLRAVSNMLQKARQTLEFYPCTSEEIDHEDITKDKTSTVEACLPL |
| | | | ELTKNESCLNSRETSFITNGSCLASRKTSFMMALCLSSIYEDLKMYQVEFKTMNAKLLMDPKRQIFLDQN |
| | | | MLAVIDELMQALNFNSETVPQKSSLEEPDFYKTKIKLCILLHAFRIRAVTIDRVMSYLNAS |
| [symbol] | DNA409 | Hole: hFc(N297A)- | DKTHTCPPCPAPELLGGPSVFLFPPKPKDTLMISRTPEVTCVVVDVSHEDPEVKFNWYVDGVEVHNAKTK |
| | | hCD212(24-545) | PREEQYASTYRVVSVLTVLHQDWLNGKEYKCKVSNKALPAPIEKTISKAKGQPREPQVCTLPPSRDELTK |
| | | | NQVSLSCAVKGFYPSDIAVEWESNGQPENNYKTTPPVLDSDGSFFLVSKLTVDKSRWQQGNVFSCSVMHE |
| | | | ALHNHYTQKSLSLSPGGGGGSGGGGSCRTSECCFQDPPYPDADSGSASGPRDLRCYRISSDRYECSWQYE |
| | | | GPTAGVSHFLRCCLSSGRCCYFAAGSATRLQFSDQAGVSVLYTVTLWVESWARNQTEKSPEVTLQLYNSV |
| | | | KYEPPLGDIKVSKLAGOLRMEWETPDNQVGAEVQFRHRTPSSPWKLGDCGPQDDDTESCLCPLEMNVAQE |
| | | | FQLRRRQLGSQGSSWSKWSSPVCVPPENPPQPQVRFSVEQLGQDGRRRLTLKEQPTQLELPEGCQGLAPG |
| | | | TEVTYRLQLHMLSCPCKAKATRTLHLGKMPYLSGAAYNVAVISSNOFGPGLNQTWHIPADTHTEPVALNI |
| | | | SVGTNGTTMYWPARAQSMTYCIEWQPVGQDGGLATCSLTAPQDPDPAGMATYSWSRESGAMGQEKCYYIT |
| | | | IFASAHPEKLTLWSTVLSTYHFGGNASAAGTPHHVSVKNHSLDSVSVDWAPSLLSTCPGVLKEYVVRCRD |
| | | | EDSKQVSEHPVQPTETQVTLSGLRAGVAYTVQVRADTAWLRGVWSQPQRFSIEVQVSD |
| [symbol] | DNA407 | Knob: hFc(N297A)- | DKTHTCPPCPAPELLGGPSVFLFPPKPKDTLMISRTPEVTCVVVDVSHEDPEVKFNWYVDGVEVHNAKTK |
| | | [VPLSLY]-hIL12B- | PREEQYASTYRVVSVLTVLHQDWLNGKEYKCKVSNKALPAPIEKTISKAKGQPREPQVYTLPPCRDELTK |
| | | hIL12A | NQVSLWCLVKGFYPSDIAVEWESNGQPENNYKTTPPVLDSDGSFFLYSKLTVDKSRWQQGNVFSCSVMHE |
| | | | ALHNHYTQKSLSLSPGGGSGGSGGSVPLSLYSGPIWELKKDVYVVELDWYPDAPGEMVVLTCDTPEEDGI |
| | | | TWTLDQSSEVLGSGKTLTIQVKEFGDAGQYTCHKGGEVLSHSLLLLHKKEDGIWSTDILKDQKEPKNKTF |
| | | | LRCEAKNYSGRFTCWWLTTISTDLTFSVKSSRGSSDPQGVTCGAATLSAERVRGDNKEYEYSVECQEDSA |
| | | | CPAAEESLPIEVMVDAVHKLKYENYTSSFFIRDIIKPDPPKNLQLKPLKNSRQVEVSWEYPDTWSTPHSY |
| | | | FSLTFCVQVQGKSKREKKDRVFTDKTSATVICRKNASISVRAQDRYYSSSWSEWASVPCSGGGGSGGGGS |
| | | | GGGGSRNLPVATPDPGMFPCLHHSQNLLRAVSNMLQKARQTLEFYPCTSEEIDHEDITKDKTSTVEACLP |
| | | | LELTKNESCLNSRETSFITNGSCLASRKTSFMMALCLSSIYEDLKMYQVEFKTMNAKLLMDPKRQIFLDQ |
| | | | NMLAVIDELMQALNFNSETVPQKSSLEEPDFYKTKIKLCILLHAFRIRAVTIDRVMSYLNAS |
| [symbol] | DNA425 | Hole: hFc(N297A - | DKTHTCPPCPAPELLGGPSVFLFPPKPKDTLMISRTPEVTCVVVDVSHEDPEVKFNWYVDGVEVHNAKTK |
| | | IL12RB2(24-622) | PREEQYASTYRVVSVLTVLHQDWLNGKEYKCKVSNKALPAPIEKTISKAKGQPREPQVCTLPPSRDELTK |
| | | | NQVSLSCAVKGFYPSDIAVEWESNGQPENNYKTTPPVLDSDGSFFLVSKLTVDKSRWQQGNVFSCSVMHE |
| | | | ALHNHYTQKSLSLSPGGGGGSGGGGSKIDACKRGDVTVKPSHVILLGSTVNITCSLKPRQGCFHYSRRNK |
| | | | LILYKFDRRINFHHGHSLNSQVTGLPLGTTLFVCKLACINSDEIQICGAEIFVGVAPEQPQNLSCIQKGE |
| | | | QGTVACTWERGRDTHLYTEYTLQLSGPKNLTWQKQCKDIYCDYLDFGINLTPESPESNFTAKVTAVNSLG |
| | | | SSSSLPSTFTFLDIVRPLPPWDIRIKFQKASVSRCTLYWRDEGLVLLNRLRYRPSNSRLWNMVNVTKAKG |
| | | | RHDLLDLKPFTEYEFQISSKLHLYKGSWSDWSESLRAQTPEEEPTGMLDVWYMKRHIDYSRQQISLFWKN |
| | | | LSVSEARGKILHYQVTLQELTGGKAMTQNITGHTSWTTVIPRTGNWAVAVSAANSKGSSLPTRINIMNLC |
| | | | EAGLLAPRQVSANSEGMDNILVTWQPPRKDPSAVQEYVVEWRELHPGGDTQVPLNWLRSRPYNVSALISE |
| | | | NIKSYICYEIRVYALSGDQGGCSSILGNSKHKAPLSGPHINAITEEKGSILISWNSIPVQEQMGCLLHYR |
| | | | IYWKERDSNSQPQLCEIPYRVSQNSHPINSLQPRVTYVLWMTALTAAGESSHGNEREFCLQGKAN |
| [symbol] | DNA407 | Knob: hFc(N297A)- | DKTHTCPPCPAPELLGGPSVFLFPPKPKDTLMISRTPEVTCVVDVSHEDPEVKFNWYVDGVEVHNAKTKP |
| | | [VPLSLY]-hIL12B- | REEQYASTYRVVSVLTVLHQDWLNGKEYKCKVSNKALPAPIEKTISKAKGQPREPQVYTLPPCRDELTKN |
| | | hIL12A | QVSLWCLVKGFYPSDIAVEWESNGQPENNYKTTPPVLDSDGSFFLYSKLTVDKSRWQQGNVFSCSVMHEA |
| | | | LHNHYTQKSLSLSPGGGSGGSGGSVPLSLYSGPIWELKKDVYVVELDWYPDAPGEMVVLTCDTPEEDGIT |
| | | | WTLDQSSEVLGSGKTLTIQVKEFGDAGQYTCHKGGEVLSHSLLLLHKKEDGIWSTDILKDQKEPKNKTFL |
| | | | RCEAKNYSGRFTCWWLTTISTDLTFSVKSSRGSSDPQGVTCGAATLSAERVRGDNKEYEYSVECQEDSAC |
| | | | PAAEESLPIEVMVDAVHKLKYENYTSSFFIRDIIKPDPPKNLQLKPLKNSRQVEVSWEYPDTWSTPHSYF |
| | | | SLTFCVQVQGKSKREKKDRVFTDKTSATVICRKNASISVRAQDRYYSSSWSEWASVPCSGGGGSGGGGSG |
| | | | GGGSRNLPVATPDPGMFPCLHHSQNLLRAVSNMLQKARQTLEFYPCTSEEIDHEDITKDKTSTVEACLPL |
| | | | ELTKNESCLNSRETSFITNGSCLASRKTSFMMALCLSSIYEDLKMYQVEFKTMNAKLLMDPKRQIFLDQN |
| | | | MLAVIDELMQALNFNSETVPQKSSLEEPDFYKTKIKLCILLHAFRIRAVTIDRVMSYLNAS |
| [symbol] | DNA410 | Hole: hFc(N297A)- | DKTHTCPPCPAPELLGGPSVFLFPPKPKDTLMISRTPEVTCVVVDVSHEDPEVKFNWYVDGVEVHNAKTK |
| | | hCD212(24-237) | PREEQYASTYRVVSVLTVLHQDWLNGKEYKCKVSNKALPAPIEKTISKAKGQPREPQVCTLPPSRDELTK |
| | | | NQVSLSCAVKGFYPSDIAVEWESNGQPENNYKTTPPVLDSDGSFFLVSKLTVDKSRWQQGNVFSCSVMHE |
| | | | ALHNHYTQKSLSLSPGGGGGSGGGGSCRTSECCFQDPPYPDADSGSASGPRDLRCYRISSDRYECSWQYE |
| | | | GPTAGVSHFLRCCLSSGRCCYFAAGSATRLQFSDQAGVSVLYTVTLWVESWARNQTEKSPEVTLQLYNSV |
| | | | KYEPPLGDIKVSKLAGQLRMEWETPDNQVGAEVQFRHRTPSSPWKLGDCGPQDDDTESCLCPLEMNVAQE |
| | | | FQLRRRQLGSQGSSWSKWSSPVCVPPENP |
| [symbol] | DNA407 | Knob: hFc(N297A)- | DKTHTCPPCPAPELLGGPSVFLFPPKPKDTLMISRTPEVTCVVVDVSHEDPEVKFNWYVDGVEVHNAKTK |
| | | [VPLSLY]-hIL12B- | PREEQYASTYRVVSVLTVLHQDWLNGKEYKCKVSNKALPAPiEKTiSKAKGQPREPQVYTLPPCRDELTK |
| | | hIL12A | NQVSLWCLVKGFYPSDIAVEWESNGQPENNYKTTPPVLDSDGSFFLYSKLTVDKSRWQQGNVFSCSVMHE |
| | | | ALHNHYTQKSLSLSPGGGSGGSGGSVPLSLYSGPIWELKKDVYVVELDWYPDAPGEMVVLTCDTPEEDGI |
| | | | TWTLDQSSEVLGSGKTLTIQVKEFGDAGQYTCHKGGEVLSHSLLLLHKKEDGIWSTDILKDQKEPKNKTF |
| | | | LRCEAKNYSGRFTCWWLTTISTDLTFSVKSSRGSSDPQGVTCGAATLSAERVRGDNKEYEYSVECQEDSA |
| | | | CPAAEESLPIEVMVDAVHKLKYENYTSSFFIRDIIKPDPPKNLQLKPLKNSRQVEVSWEYPDTWSTPHSY |
| | | | FSLTFCVQVQGKSKREKKDRVFTDKTSATVICRKNASISVRAQDRYYSSSWSEWASVPCSGGGGSGGGGS |
| | | | GGGGSRNLPVATPDPGMFPCLHHSQNLLRAVSNMLQKARQTLEFYPCTSEEIDHEDITKDKTSTVEACLP |
| | | | LELTKNESCLNSRETSFITNGSCLASRKTSFMMALCLSSIYEDLKMYQVEFKTMNAKLLMDPKRQIFLDQ |
| | | | NMLAVIDELMQALNFNSETVPQKSSLEEPDFYKTKIKLCILLHAFRIRAVTIDRVMSYLNAS |
| [symbol] | DNA426 | Hole: hFc(N297A)- | DKTHTCPPCPAPELLGGPSVFLFPPKPKDTLMISRTPEVTCVVVDVSHEDPEVKFNWYVDGVEVHNAKTK |
| | | IL12RB2(24-319) | PREEQYASTYRVVSVLTVLHQDWLNGKEYKCKVSNKALPAPIEKTISKAKGQPREPQVCTLPPSRDELTK |
| | | | NQVSLSCAVKGFYPSDIAVEWESNGQPENNYKTTPPVLDSDGSFFLVSKLTVDKSRWQQGNVFSCSVMHE |
| | | | ALHNHYTQKSLSLSPGGGGGSGGGGSKIDACKRGDVTVKPSHVILLGSTVNITCSLKPRQGCFHYSRRNK |
| | | | LILYKFDRRINFHHGHSLNSQVTGLPLGTTLFVCKLACINSDEIQICGAEIFVGVAPEQPQNLSCIQKGE |
| | | | QGTVACTWERGRDTHLYTEYTLQLSGPKNLTWQKQCKDIYCDYLDFGINLTPESPESNFTAKVTAVNSLG |
| | | | SSSSLPSTFTFLDIVRPLPPWDIRIKFQKASVSRCTLYWRDEGLVLLNRLRYRPSNSRLWNMVNVTKAKG |
| | | | RHDLLDLKPFTEYEFQISSKLHLYKGSWSDWSESLRAQTPEE |
| [symbol] | DNA406 | Knob: hFc(N297A)- | DKTHTCPPCPAPELLGGPSVFLFPPKPKDTLMISRTPEVTCVVVDVSHEDPEVKFNWYVDGVEVHNAKTK |
| | | [VPLSLY]-hIL12B- | PREEQYASTYRVVSVLTVLHQDWLNGKEYKCKVSNKALPAPIEKTISKAKGQPREPQVYTLPPCRDELTK |
| | | hIL12A | NQVSLWCLVKGFYPSDIAVEWESNGQPENNYKTTPPVLDSDGSFFLYSKLTVDKSRWQQGNVFSCSVMHE |
| | | | ALHNHYTQKSLSLSPGGGSGGSVPLSLYSGPIWELKKDVYVVELDWYPDAPGEMVVLTCDTPEEDGITWT |
| | | | LDQSSEVLGSGKTLTIQVKEFGDAGQYTCHKGGEVLSHSLLLLHKKEDGIWSTDILKDQKEPKNKTFLRC |
| | | | EAKNYSGRFTCWWLTTISTDLTFSVKSSRGSSDPQGVTCGAATLSAERVRGDNKEYEYSVECQEDSACPA |
| | | | AEESLPIEVMVDAVHKLKYENYTSSFFIRDIIKPDPPKNLQLKPLKNSRQVEVSWEYPDTWSTPHSYFSL |
| | | | TFCVQVQGKSKREKKDRVFTDKTSATVICRKNASISVRAQDRYYSSSWSEWASVPCSGGGGSGGGGSGGG |
| | | | GSRNLPVATPDPGMFPCLHHSQNLLRAVSNMLQKARQTLEFYPCTSEEIDHEDITKDKTSTVEACLPLEL |
| | | | TKNESCLNSRETSFITNGSCLASRKTSFMMALCLSSIYEDLKMYQVEFKTMNAKLLMDPKRQIFLDQNML |
| | | | AVIDELMQALNFNSETVPQKSSLEEPDFYKTKIKLCILLHAFRIRAVTIDRVMSYLNAS |
| [symbol] | DNA426 | Hole: hFc(N297A)- | DKTHTCPPCPAPELLGGPSVFLFPPKPKDTLMISRTPEVTCVVVDVSHEDPEVKFNWYVDGVEVHNAKTK |
| | | IL12RB2(24-319) | PREEQYASTYRVVSVLTVLHQDWLNGKEYKCKVSNKALPAPIEKTISKAKGQPREPQVCTLPPSRDELTK |
| | | | NQVSLSCAVKGFYPSDIAVEWESNGQPENNYKTTPPVLDSDGSFFLVSKLTVDKSRWQQGNVFSCSVMHE |
| | | | ALHNHYTQKSLSLSPGGGGGSGGGGSKIDACKRGDVTVKPSHVILLGSTVNITCSLKPRQGCFHYSRRNK |
| | | | LILYKFDRRINFHHGHSLNSQVTGLPLGTTLFVCKLACINSDEIQICGAEIFVGVAPEQPQNLSCIQKGE |
| | | | QGTVACTWERGRDTHLYTEYTLQLSGPKNLTWQKQCKDIYCDYLDFGINLTPESPESNFTAKVTAVNSLG |
| | | | SSSSLPSTFTFLDIVRPLPPWDIRIKFQKASVSRCTLYWRDEGLVLLNRLRYRPSNSRLWNMVNVTKAKG |
| | | | RHDLLDLKPFTEYEFQISSKLHLYKGSWSDWSESLRAQTPEE |
| [symbol] | DNA407 | Knob: hFc(N297A)- | DKTHTCPPCPAPELLGGPSVFLFPPKPKDTLMISRTPEVTCVVVDVSHEDPEVKFNWYVDGVEVHNAKTK |
| | | [VPLSLY]-hIL12B- | PREEQYASTYRVVSVLTVLHQDWLNGKEYKCKVSNKALPAPIEKTISKAKGQPREPQVYTLPPCRDELTK |
| | | hIL12A | NQVSLWCLVKGFYPSDIAVEWESNGQPENNYKTTPPVLDSDGSFFLYSKLTVDKSRWQQGNVFSCSVMHE |
| | | | ALHNHYTQKSLSLSPGGGSGGSGGSVPLSLYSGPIWELKKDVYVVELDWYPDAPGEMVVLTCDTPEEDGI |
| | | | TWTLDQSSEVLGSGKTLTIQVKEFGDAGQYTCHKGGEVLSHSLLLLHKKEDGIWSTDILKDQKEPKNKTF |
| | | | LRCEAKNYSGRFTCWWLTTISTDLTFSVKSSRGSSDPQGVTCGAATLSAERVRGDNKEYEYSVECQEDSA |
| | | | CPAAEESLPIEVMVDAVHKLKYENYTSSFFIRDIIKPDPPKNLQLKPLKNSRQVEVSWEYPDTWSTPHSY |
| | | | FSLTFCVQVQGKSKREKKDRVFTDKTSATVICRKNASISVRAQDRYYSSSWSEWASVPCSGGGGSGGGGS |
| | | | GGGGSRNLPVATPDPGMFPCLHHSQNLLRAVSNMLQKARQTLEFYPCTSEEIDHEDITKDKTSTVEACLP |
| | | | LELTKNESCLNSRETSFITNGSCLASRKTSFMMALCLSSIYEDLKMYQVEFKTMNAKLLMDPKRQIFLDQ |
| | | | NMLAVIDELMQALNFNSETVPQKSSLEEPDFYKTKIKLCILLHAFRIRAVTIDRVMSYLNAS |
| [symbol] | DNA539 | Hole: hFc(N297A)- | DKTHTCPPCPAPELLGGPSVFLFPPKPKDTLMISRTPEVTCVVVDVSHEDPEVKFNWYVDGVEVHNAKTK |
| | | IL12RB2(24-222) | PREEQYASTYRVVSVLTVLHQDWLNGKEYKCKVSNKALPAPIEKTISKAKGQPREPQVCTLPPSRDELTK |
| | | | NQVSLSCAVKGFYPSDIAVEWESNGQPENNYKTTPPVLDSDGSFFLVSKLTVDKSRWQQGNVFSCSVMHE |
| | | | ALHNHYTQKSLSLSPGGGGGSGGGGSKIDACKRGDVTVKPSHVILLGSTVNITCSLKPRQGCFHYSRRNK |
| | | | LILYKFDRRINFHHGHSLNSQVTGLPLGTTLFVCKLACINSDEIQICGAEIFVGVAPEQPQNLSCIQKGE |
| | | | QGTVACTWERGRDTHLYTEYTLQLSGPKNLTWQKQCKDIYCDYLDFGINLTPESPESNFTAKVTAVNSLG |
| | | | SSSSLPSTFTFLDIV |
| [symbol] | DNA407 | Knob: hFc(N297A)- | DKTHTCPPCPAPELLGGPSVFLFPPKPKDTLMISRTPEVTCVVVDVSHEDPEVKFNWYVDGVEVHNAKTK |
| | | [VPLSLY]-hIL12B- | PREEQYASTYRVVSVLTVLHQDWLNGKEYKCKVSNKALPAPIEKTISKAKGQPREPQVYTLPPCRDELTK |
| | | hIL12A | NQVSLWCLVKGFYPSDIAVEWESNGQPENNYKTTPPVLDSDGSFFLYSKLTVDKSRWQQGNVFSCSVMHE |
| | | | ALHNHYTQKSLSLSPGGGSGGSGGSVPLSLYSGPIWELKKDVYVVELDWYPDAPGEMVVLTCDTPEEDGI |
| | | | TWTLDQSSEVLGSGKTLTIQVKEFGDAGQYTCHKGGEVLSHSLLLLHKKEDGIWSTDILKDQKEPKNKTF |
| | | | LRCEAKNYSGRFTCWWLTTISTDLTFSVKSSRGSSDPQGVTCGAATLSAERVRGDNKEYEYSVECQEDSA |
| | | | CPAAEESLPIEVMVDAVHKLKYENYTSSFFIRDIIKPDPPKNLQLKPLKNSRQVEVSWEYPDTWSTPHSY |
| | | | FSLTFCVQVQGKSKREKKDRVFTDKTSATVICRKNASISVRAQDRYYSSSWSEWASVPCSGGGGSGGGGS |
| | | | GGGGSRNLPVATPDPGMFPCLHHSQNLLRAVSNMLQKARQTLEFYPCTSEEIDHEDITKDKTSTVEACLP |
| | | | LELTKNESCLNSRETSFITNGSCLASRKTSFMMALCLSSIYEDLKMYQVEFKTMNAKLLMDPKRQIFLDQ |
| | | | NMLAVIDELMQALNFNSETVPQKSSLEEPDFYKTKIKLCILLHAFRIRAVTIDRVMSYLNAS |
| [symbol] | DNA540 | Hole: hFc(N297A)- | DKTHTCPPCPAPELLGGPSVFLFPPKPKDTLMISRTPEVTCVVVDVSHEDPEVKFNWYVDGVEVHNAKTK |
| | | IL12RB2(24-319) | PREEQYASTYRVVSVLTVLHQDWLNGKEYKCKVSNKALPAPIEKTISKAKGQPREPQVCTLPPSRDELTK |
| | | | NQVSLSCAVKGFYPSDIAVEWESNGQPENNYKTTPPVLDSDGSFFLVSKLTVDKSRWQQGNVFSCSVMHE |
| | | | ALHNHYTQKSLSLSPGGGSGGGSGKIDACKRGDVTVKPSHVILLGSTVNITCSLKPRQGCFHYSRRNKLI |
| | | | LYKFDRRINFHHGHSLNSQVTGLPLGTTLFVCKLACINSDEIQICGAEIFVGVAPEQPQNLSCIQKGEQG |
| | | | TVACTWERGRDTHLYTEYTLQLSGPKNLTWQKQCKDIYCDYLDFGINLTPESPESNFTAKVTAVNSLGSS |
| | | | SSLPSTFTFLDIVRPLPPWDIRIKFQKASVSRCTLYWRDEGLVLLNRLRYRPSNSRLWNMVNVTKAKGRH |
| | | | DLLDLKPFTEYEFQISSKLHLYKGSWSDWSESLRAQTPEE |
| [symbol] | DNA407 | Knob: hFc(N297A)- | DKTHTCPPCPAPELLGGPSVFLFPPKPKDTLMISRTPEVTCVVVDVSHEDPEVKFNWYVDGVEVHNAKTK |
| | | [VPLSLY]-hIL12B- | PREEQYASTYRVVSVLTVLHQDWLNGKEYKCKVSNKALPAPIEKTISKAKGQPREPQVYTLPPCRDELTK |
| | | hIL12A | NQVSLWCLVKGFYPSDIAVEWESNGQPENNYKTTPPVLDSDGSFFLYSKLTVDKSRWQQGNVFSCSVMHE |
| | | | ALHNHYTQKSLSLSPGGGSGGSGGSVPLSLYSGPIWELKKDVYVVELDWYPDAPGEMVVLTCDTPEEDGI |
| | | | TWTLDQSSEVLGSGKTLTIQVKEFGDAGQYTCHKGGEVLSHSLLLLHKKEDGIWSTDILKDQKEPKNKTF |
| | | | LRCEAKNYSGRFTCWWLTTISTDLTFSVKSSRGSSDPQGVTCGAATLSAERVRGDNKEYEYSVECQEDSA |
| | | | CPAAEESLPIEVMVDAVHKLKYENYTSSFFiRDIIKPDPPKNLQLKPLKNSRQVEVSWEYPDTWSTPHSY |
| | | | FSLTFCVQVQGKSKREKKDRVFTDKTSATVICRKNASiSVRAQDRYYSSSWSEWASVPCSGGGGSGGGGS |
| | | | GGGGSRNLPVATPDPGMFPCLHHSQNLLRAVSNMLQKARQTLEFYPCTSEEiDHEDITKDKTSTVEACLP |
| | | | LELTKNESCLNSRETSFfTNGSCLASRKTSFMMALCLSSIYEDLKMYQVEFKTMNAKLLMDPKRQIFLDQ |
| | | | NMLAVIDELMQALNFNSETVPQKSSLEEPDFYKTKIKLCILLHAFRIRAVTIDRVMSYLNAS |
| [symbol] | DNA541 | Hole: hFc(N297A)- | DKTHTCPPCPAPELLGGPSVFLFPPKPKDTLMISRTPEVTCVVVDVSHEDPEVKFNWYVDGVEVHNAKTK |
| | | IL12RB2(24-319) | PREEQYASTYRVVSVLTVLHQDWLNGKEYKCKVSNKALPAPIEKTISKAKGQPREPQVCTLPPSRDELTK |
| | | | NQVSLSCAVKGFYPSDIAVEWESNGQPENNYKTTPPVLDSDGSFFLVSKLTVDKSRWQQGNVFSCSVMHE |
| | | | ALHNHYTQKSLSLSPGGGGGSKIDACKRGDVTVKPSHVILLGSTVNITCSLKPRQGCFHYSRRNKLILYK |
| | | | FDRRINFHHGHSLNSQVTGLPLGTTLFVCKLACINSDEiQICGAEIFVGVAPEQPQNLSCIQKGEQGTVA |
| | | | CTWERGRDTHLYTEYTLQLSGPKNLTWQKQCKDIYCDYLDFGINLTPESPESNFTAKVTAVNSLGSSSSL |
| | | | PSTFTFLDIVRPLPPWDIRIKFQKASVSRCTLYWRDEGLVLLNRLRYRPSNSRLWNMVNVTKAKGRHDLL |
| | | | DLKPFTEYEFQISSKLHLYKGSWSDWSESLRAQTPEE |
| [symbol] | DNA407 | Knob: hFc(N297A)- | DKTHTCPPCPAPELLGGPSVFLFPPKPKDTLMISRTPEVTCVVVDVSHEDPEVKFNWYVDGVEVHNAKTK |
| | | [VPLSLY]-hIL12B- | PREEQYASTYRVVSVLTVLHQDWLNGKEYKCKVSNKALPAPIEKTISKAKGQPREPQVYTLPPCRDELTK |
| | | hIL12A | NQVSLWCLVKGFYPSDIAVEWESNGQPENNYKTTPPVLDSDGSFFLYSKLTVDKSRWQQGNVFSCSVMHE |
| | | | ALHNHYTQKSLSLSPGGGSGGSGGSVPLSLYSGPIWELKKDVYVVELDWYPDAPGEMWLTCDTPEEDGIT |
| | | | WTLDQSSEVLGSGKTLTIQVKEFGDAGQYTCHKGGEVLSHSLLLLHKKEDGIWSTDILKDQKEPKNKTFL |
| | | | RCEAKNYSGRFTCWWLTTISTDLTFSVKSSRGSSDPQGVTCGAATLSAERVRGDNKEYEYSVECQEDSAC |
| | | | PAAEESLPIEVMVDAVHKLKYENYTSSFFIRDIIKPDPPKNLQLKPLKNSRQVEVSWEYPDTWSTPHSYF |
| | | | SLTFCVQVQGKSKREKKDRVFTDKTSATVICRKNASISVRAQDRYYSSSWSEWASVPCSGGGGSGGGGSG |
| | | | GGGSRNLPVATPDPGMFPCLHHSQNLLRAVSNMLQKARQTLEFYPCTSEEIDHEDITKDKTSTVEACLPL |
| | | | ELTKNESCLNSRETSFITNGSCLASRKTSFMMALCLSSIYEDLKMYQVEFKTMNAKLLMDPKRQIFLDQN |
| | | | MLAVIDELMQALNFNSETVPQKSSLEEPDFYKTKIKLCILLHAFRIRAVTIDRVMSYLNAS |
| [symbol] | DNA629 | Hole: hFc(N297A)- | DKTHTCPPCPAPELLGGPSVFLFPPKPKDTLMISRTPEVTCVVVDVSHEDPEVKFNWYVDGVEVHNAKTK |
| | | IL12RB2(24-212) | PREEQYASTYRVVSVLTVLHQDWLNGKEYKCKVSNKALPAPIEKTISKAKGQPREPQVCTLPPSRDELTK |
| | | | NQVSLSCAVKGFYPSDIAVEWESNGQPENNYKTTPPVLDSDGSFFLVSKLTVDKSRWQQGNVFSCSVMHE |
| | | | ALHNHYTQKSLSLSPGGGGGSGGGGSKIDACKRGDVTVKPSHVILLGSTVNITCSLKPRQGCFHYSRRNK |
| | | | LILYKFDRRINFHHGHSLNSQVTGLPLGTTLFVCKLACINSDEIQICGAEIFVGVAPEQPQNLSCIQKGE |
| | | | QGTVACTWERGRDTHLYTEYTLQLSGPKNLTWQKQCKDIYCDYLDFGINLTPESPESNFTAKVTAVNSLG |
| | | | SSSSL |
| [symbol] | DNA407 | Knob: hFc(N297A)- | DKTHTCPPCPAPELLGGPSVFLFPPKPKDTLMISRTPEVTCVVVDVSHEDPEVKFNWYVDGVEVHNAKTK |
| | | [VPLSLY]-hIL12B- | PREEQYASTYRVVSVLTVLHQDWLNGKEYKCKVSNKALPAPIEKTISKAKGQPREPQVYTLPPCRDELTK |
| | | hIL12A | NQVSLWCLVKGFYPSDIAVEWESNGQPENNYKTTPPVLDSDGSFFLYSKLTVDKSRWQQGNVFSCSVMHE |
| | | | ALHNHYTQKSLSLSPGGGSGGSGGSVPLSLYSGPIWELKKDVYVVELDWYPDAPGEMWLTCDTPEEDGIT |
| | | | WTLDQSSEVLGSGKTLTiQVKEFGDAGQYTCHKGGEVLSHSLLLLHKKEDGIWSTDILKDQKEPKNKTFL |
| | | | RCEAKNYSGRFTCWWLTTISTDLTFSVKSSRGSSDPQGVTCGAATLSAERVRGDNKEYEYSVECQEDSAC |
| | | | PAAEESLPIEVMVDAVHKLKYENYTSSFFIRDIIKPDPPKNLQLKPLKNSRQVEVSWEYPDTWSTPHSYF |
| | | | SLTFCVQVQGKSKREKKDRVFTDKTSATVICRKNASISVRAQDRYYSSSWSEWASVPCSGGGGSGGGGSG |
| | | | GGGSRNLPVATPDPGMFPCLHHSQNLLRAVSNMLQKARQTLEFYPCTSEEIDHEDITKDKTSTVEACLPL |
| | | | ELTKNESCLNSRETSFITNGSCLASRKTSFMMALCLSSIYEDLKMYQVEFKTMNAKLLMDPKRQIFLDQN |
| | | | MLAVIDELMQALNFNSETVPQKSSLEEPDFYKTKIKLCILLHAFRIRAVTIDRVMSYLNAS |
| [symbol] | DNA644 | Hole: hFc(N297A)- | DKTHTCPPCPAPELLGGPSVFLFPPKPKDTLMISRTPEVTCVVVDVSHEDPEVKFNWYVDGVEVHNAKTK |
| | | IL12RB2(24-227) | PREEQYASTYRVVSVLTVLHQDWLNGKEYKCKVSNKALPAPIEKTISKAKGQPREPQVCTLPPSRDELTK |
| | | | NQVSLSCAVKGFYPSDIAVEWESNGQPENNYKTTPPVLDSDGSFFLVSKLTVDKSRWQQGNVFSCSVMHE |
| | | | ALHNHYTQKSLSLSPGGGGGSGGGGSKIDACKRGDVTVKPSHVILLGSTVNITCSLKPRQGCFHYSRRNK |
| | | | LILYKFDRRINFHHGHSLNSQVTGLPLGTTLFVCKLACINSDEIQICGAEIFVGVAPEQPQNLSCIQKGE |
| | | | QGTVACTWERGRDTHLYTEYTLQLSGPKNLTWQKQCKDIYCDYLDFGINLTPESPESNFTAKVTAVNSLG |
| | | | SSSSLPSTFTFLDIVRPLPP |

[symbol]

indicates data missing or illegible when filed

| | | Component 1 | Component 25 |
|---|---|---|---|
| [symbol] ne | newnames | Sequence | Sequence |
| [symbol] | Hole: hFc(N297A) | DKTHTCPPCPAPELLGGPSVFLFPPKPKDTLMIS | |
| | | RTPEVTCVVVDVSHEDPEVKFNWYVDGVEVHNAK | |
| | | TKPREEQYASTYRVVSVLTVLHQDWLNGKEYKCK | |
| | | VSNKALPAPIEKTISKAKGQPREPQVCTLPPSRD | |
| | | ELTKNQVSLSCAVKGFYPSDIAVEWESNGQPENN | |
| | | YKTTPPVLDSDGSFFLVSKLTVDKSRWQQGNVFS | |
| | | CSVMHEALHNHYTQKSLSLSPG | |
| [symbol] | Knob: hFc(N297A)- | DKTHTCPPCPAPELLGGPSVFLFPPKPKDTLMIS | GGSGGS |
| | [VPLSLY]-hIL12B- | RTPEVTCVVVDVSHEDPEVKFNWYVDGVEVHNAK | |
| | hIL12A | TKPREEQYASTYRVVSVLTVLHQDWLNGKEYKCK | |
| | | VSNKALPAPIEKTISKAKGQPREPQVYTLPPCRD | |
| | | ELTKNQVSLWCLVKGFYPSDIAVEWESNGQPENN | |
| | | YKTTPPVLDSDGSFFLYSKLTVDKSRWQQGNVFS | |
| | | CSVMHEALHNHYTQKSLSLSPG | |
| [symbol] | Knob: hFc(N297A)- | DKTHTCPPCPAPELLGGPSVFLFPPKPKDTLMIS | GGSGGSGGS |
| | [VPLSLY]-hIL12B- | RTPEVTCVVVDVSHEDPEVKFNWYVDGVEVHNAK | |
| | hIL12A | TKPREEQYASTYRVVSVLTVLHQDWLNGKEYKCK | |
| | | VSNKALPAPIEKTISKAKGQPREPQVYTLPPCRD | |
| | | ELTKNQVSLWCLVKGFYPSDIAVEWESNGQPENN | |
| | | YKTTPPVLDSDGSFFLYSKLTVDKSRWQQGNVFS | |
| | | CSVMHEALHNHYTQKSLSLSPG | |
| [symbol] | Hole: hFc(N297A)- | DKTHTCPPCPAPELLGGPSVFLFPPKPKDTLMIS | GGGGSGGGGS |
| | hCD212(24-545) | RTPEVTCVVVDVSHEDPEVKFNWYVDGVEVHNAK | |
| | | TKPREEQYASTYRVVSVLTVLHQDWLNGKEYKCK | |
| | | VSNKALPAPIEKTISKAKGQPREPQVCTLPPSRD | |
| | | ELTKNQVSLSCAVKGFYPSDIAVEWESNGQPENN | |
| | | YKTTPPVLDSDGSFFLVSKLTVDKSRWQQGNVFS | |
| | | CSVMHEALHNHYTQKSLSLSPG | |
| [symbol] | Hole: hFc(N297A)- | DKTHTCPPCPAPELLGGPSVFLFPPKPKDTLMIS | GGGGSGGGGS |
| | hCD212(24-237) | RTPEVTCVVVDVSHEDPEVKFNWYVDGVEVHNAK | |
| | | TKPREEQYASTYRVVSVLTVLHQDWLNGKEYKCK | |
| | | VSNKALPAPIEKTISKAKGQPREPQVCTLPPSRD | |
| | | ELTKNQVSLSCAVKGFYPSDIAVEWESNGQPENN | |
| | | YKTTPPVLDSDGSFFLVSKLTVDKSRWQQGNVFS | |
| | | CSVMHEALHNHYTOKSLSLSPG | |
| [symbol] | Hole: hFc(N297A)- | DKTHTCPPCPAPELLGGPSVFLFPPKPKDTLMIS | GGGGSGGGGS |
| | IL12RB2(24-622) | RTPEVTCVVVDVSHEDPEVKFNWYVDGVEVHNAK | |
| | | TKPREEQYASTYRVVSVLTVLHQDWLNGKEYKCK | |
| | | VSNKALPAPIEKTISKAKGQPREPQVCTLPPSRD | |
| | | ELTKNQVSLSCAVKGFYPSDIAVEWESNGQPENN | |
| | | YKTTPPVLDSDGSFFLVSKLTVDKSRWQQGNVFS | |
| | | CSVMHEALHNHYTQKSLSLSPG | |
| [symbol] | Hole: hFc(N297A)- | DKTHTCPPCPAPELLGGPSVFLFPPKPKDTLMIS | GGGGSGGGGS |
| | IL12RB2(24-319) | RTPEVTCVVVDVSHEDPEVKFNWYVDGVEVHNAK | |
| | | TKPREEQYASTYRVVSVLTVLHQDWLNGKEYKCK | |
| | | VSNKALPAPIEKTISKAKGQPREPQVCTLPPSRD | |
| | | ELTKNQVSLSCAVKGFYPSDIAVEWESNGQPENN | |
| | | YKTTPPVLDSDGSFFLVSKLTVDKSRWQQGNVFS | |
| | | CSVMHEALHNHYTQKSLSLSPG | |
| [symbol] | Hole: hFc(N297A)- | DKTHTCPPCPAPELLGGPSVFLFPPKPKDTLMIS | GGGGSGGGGS |
| | IL12RB2(24-222) | RTPEVTCVVVDVSHEDPEVKFNWYVDGVEVHNAK | |
| | | TKPREEQYASTYRVVSVLTVLHQDWLNGKEYKCK | |
| | | VSNKALPAPIEKTISKAKGQPREPQVCTLPPSRD | |
| | | ELTKNQVSLSCAVKGFYPSDIAVEWESNGQPENN | |
| | | YKTTPPVLDSDGSFFLVSKLTVDKSRWQQGNVFS | |
| | | CSVMHEALHNHYTQKSLSLSPG | |
| [symbol] | Hole: hFc(N297A)- | DKTHTCPPCPAPELLGGPSVFLFPPKPKDTLMIS | GGSGGGSG |
| | IL12RB2(24-319) | RTPEVTCVVVDVSHEDPEVKFNWYVDGVEVHNAK | |
| | | TKPREEQYASTYRVVSVLTVLHQDWLNGKEYKCK | |
| | | VSNKALPAPIEKTISKAKGQPREPQVCTLPPSRD | |
| | | ELTKNQVSLSCAVKGFYPSDIAVEWESNGQPENN | |
| | | YKTTPPVLDSDGSFFLVSKLTVDKSRWQQGNVFS | |
| | | CSVMHEALHNHYTQKSLSLSPG | |
| [symbol] | Hole: hFc(N297A)- | DKTHTCPPCPAPELLGGPSVFLFPPKPKDTLMIS | GGGGS |
| | IL12RB2(24-319) | RTPEVTCVVVDVSHEDPEVKFNWYVDGVEVHNAK | |
| | | TKPREEQYASTYRVVSVLTVLHQDWLNGKEYKCK | |
| | | VSNKALPAPIEKTISKAKGQPREPQVCTLPPSRD | |
| | | ELTKNQVSLSCAVKGFYPSDIAVEWESNGQPENN | |
| | | YKTTPPVLDSDGSFFLVSKLTVDKSRWQQGNVFS | |
| | | CSVMHEALHNHYTQKSLSLSPG | |
| [symbol] | Hole hFc(N297A)- | DKTHTCPPCPAPELLGGPSVFLFPPKPKDTLMIS | GGGGSGGGGS |
| | IL12RB2(24-212) | RTPEVTCVVVDVSHEDPEVKFNWYVDGVEVHNAK | |
| | | TKPREEQYASTYRVVSVLTVLHQDWLNGKEYKCK | |
| | | VSNKALPAPIEKTISKAKGQPREPQVCTLPPSRD | |
| | | ELTKNQVSLSCAVKGFYPSDIAVEWESNGQPENN | |
| | | YKTTPPVLDSDGSFFLVSKLTVDKSRWQQGNVFS | |
| | | CSVMHEALHNHYTQKSLSLSPG | |
| [symbol] | Hole: hFc(N297A)- | DKTHTCPPCPAPELLGGPSVFLFPPKPKDTLMIS | GGGGSGGGGS |
| | IL12RB2(24-222) | RTPEVTCVVVDVSHEDPEVKFNWYVDGVEVHNAK | |
| | | TKPREEQYASTYRVVSVLTVLHQDWLNGKEYKCK | |
| | | VSNKALPAPIEKTISKAKGQPREPQVCTLPPSRD | |
| | | ELTKNQVSLSCAVKGFYPSDIAVEWESNGQPENN | |
| | | YKTTPPVLDSDGSFFLVSKLTVDKSRWQQGNVFS | |
| | | CSVMHEALHNHYTQKSLSLSPG | |
| [symbol] | Hole: hFc(N297A)- | DKTHTCPPCPAPELLGGPSVFLFPPKPKDTLMIS | GGGGSGGGGS |
| | IL12RB2(24-210) | RTPEVTCVVVDVSHEDPEVKFNWYVDGVEVHNAK | |
| | | TKPREEQYASTYRVVSVLTVLHQDWLNGKEYKCK | |
| | | VSNKALPAPIEKTISKAKGQPREPQVCTLPPSRD | |
| | | ELTKNQVSLSCAVKGFYPSDIAVEWESNGQPENN | |
| | | YKTTPPVLDSDGSFFLVSKLTVDKSRWQQGNVFS | |
| | | CSVMHEALHNHYTQKSLSLSPG | |
| [symbol] | Hole: hFc(N297A)- | DKTHTCPPCPAPELLGGPSVFLFPPKPKDTLMIS | GGGGSGGGGS |
| | IL12RB2(24-211) | RTPEVTCVVVDVSHEDPEVKFNWYVDGVEVHNAK | |
| | | TKPREEQYASTYRVVSVLTVLHQDWLNGKEYKCK | |
| | | VSNKALPAPIEKTISKAKGQPREPQVCTLPPSRD | |
| | | ELTKNQVSLSCAVKGFYPSDIAVEWESNGQPENN | |
| | | YKTTPPVLDSDGSFFLVSKLTVDKSRWQQGNVFS | |
| | | CSVMHEALHNHYTQKSLSLSPG | |
| [symbol] | Hole: hFc(N297A)- | DKTHTCPPCPAPELLGGPSVFLFPPKPKDTLMIS | GGGGSGGGGS |
| | IL12RB2(24-212) | RTPEVTCVVVDVSHEDPEVKFNWYVDGVEVHNAK | |
| | | TKPREEQYASTYRVVSVLTVLHQDWLNGKEYKCK | |
| | | VSNKALPAPIEKTISKAKGQPREPQVCTLPPSRD | |
| | | ELTKNQVSLSCAVKGFYPSDIAVEWESNGQPENN | |
| | | YKTTPPVLDSDGSFFLVSKLTVDKSRWQQGNVFS | |
| | | CSVMHEALHNHYTQKSLSLSPG | |
| [symbol] | Hole: hFc(N297A)- | DKTHTCPPCPAPELLGGPSVFLFPPKPKDTLMIS | GGGGSGGGGS |
| | IL12RB2(24-213) | RTPEVTCVVVDVSHEDPEVKFNWYVDGVEVHNAK | |
| | | TKPREEQYASTYRVVSVLTVLHQDWLNGKEYKCK | |
| | | VSNKALPAPIEKTISKAKGQPREPQVCTLPPSRD | |
| | | ELTKNQVSLSCAVKGFYPSDIAVEWESNGQPENN | |
| | | YKTTPPVLDSDGSFFLVSKLTVDKSRWQQGNVFS | |
| | | CSVMHEALHNHYTQKSLSLSPG | |
| [symbol] | Hole: hFc(N297A)- | DKTHTCPPCPAPELLGGPSVFLFPPKPKDTLMIS | GGGGSGGGGS |
| | IL12RB2 (24-214) | RTPEVTCVVVDVSHEDPEVKFNWYVDGVEVHNAK | |
| | | TKPREEQYASTYRVVSVLTVLHQDWLNGKEYKCK | |
| | | VSNKALPAPIEKTISKAKGQPREPQVCTLPPSRD | |
| | | ELTKNQVSLSCAVKGFYPSDIAVEWESNGQPENN | |
| | | YKTTPPVLDSDGSFFLVSKLTVDKSRWQQGNVFS | |
| | | CSVMHEALHNHYTQKSLSLSPG | |
| [symbol] | Hole: hFc(N297A)- | DKTHTCPPCPAPELLGGPSVFLFPPKPKDTLMIS | GGGGSGGGGS |
| | IL12RB2(24-215) | RTPEVTCVVVDVSHEDPEVKFNWYVDGVEVHNAK | |
| | | TKPREEQYASTYRVVSVLTVLHQDWLNGKEYKCK | |
| | | VSNKALPAPIEKTISKAKGQPREPQVCTLPPSRD | |
| | | ELTKNQVSLSCAVKGFYPSDIAVEWESNGQPENN | |
| | | YKTTPPVLDSDGSFFLVSKLTVDKSRWQQGNVFS | |
| | | CSVMHEALHNHYTQKSLSLSPG | |
| [symbol] | Hole: hFc(N297A)- | DKTHTCPPCPAPELLGGPSVFLFPPKPKDTLMIS | GGGGSGGGGS |
| | IL12RB2(24-216) | RTPEVTCVVVDVSHEDPEVKFNWYVDGVEVHNAK | |
| | | TKPREEQYASTYRVVSVLTVLHQDWLNGKEYKCK | |
| | | VSNKALPAPIEKTISKAKGQPREPQVCTLPPSRD | |
| | | ELTKNQVSLSCAVKGFYPSDIAVEWESNGQPENN | |
| | | YKTTPPVLDSDGSFFLVSKLTVDKSRWQQGNVFS | |
| | | CSVMHEALHNHYTQKSLSLSPG | |
| [symbol] | Hole: hFc(N297A)- | DKTHTCPPCPAPELLGGPSVFLFPPKPKDTLMIS | GGGGSGGGGS |
| | IL12RB2(24-217) | RTPEVTCVVVDVSHEDPEVKFNWYVDGVEVHNAK | |
| | | TKPREEQYASTYRVVSVLTVLHQDWLNGKEYKCK | |
| | | VSNKALPAPIEKTISKAKGQPREPQVCTLPPSRD | |
| | | ELTKNQVSLSCAVKGFYPSDIAVEWESNGQPENN | |
| | | YKTTPPVLDSDGSFFLVSKLTVDKSRWQQGNVFS | |
| | | CSVMHEALHNHYTQKSLSLSPG | |
| [symbol] | Hole: hFc(N297A)- | DKTHTCPPCPAPELLGGPSVFLFPPKPKDTLMIS | GGGGSGGGGS |
| | IL12RB2(24-218) | RTPEVTCVVVDVSHEDPEVKFNWYVDGVEVHNAK | |
| | | TKPREEQYASTYRVVSVLTVLHQDWLNGKEYKCK | |
| | | VSNKALPAPIEKTISKAKGQPREPQVCTLPPSRD | |
| | | ELTKNQVSLSCAVKGFYPSDIAVEWESNGQPENN | |
| | | YKTTPPVLDSDGSFFLVSKLTVDKSRWQQGNVFS | |
| | | CSVMHEALHNHYTQKSLSLSPG | |
| [symbol] | Hole: hFc(N297A)- | DKTHTCPPCPAPELLGGPSVFLFPPKPKDTLMIS | GGGGSGGGGS |
| | IL12RB2(24-219) | RTPEVTCVVVDVSHEDPEVKFNWYVDGVEVHNAK | |
| | | TKPREEQYASTYRVVSVLTVLHQDWLNGKEYKCK | |
| | | VSNKALPAPIEKTISKAKGQPREPQVCTLPPSRD | |
| | | ELTKNQVSLSCAVKGFYPSDIAVEWESNGQPENN | |
| | | YKTTPPVLDSDGSFFLVSKLTVDKSRWQQGNVFS | |
| | | CSVMHEALHNHYTQKSLSLSPG | |
| [symbol] | Hole: hFc(N297A)- | DKTHTCPPCPAPELLGGPSVFLFPPKPKDTLMIS | GGGGSGGGGS |
| | IL12RB2(24-220) | RTPEVTCVVVDVSHEDPEVKFNWYVDGVEVHNAK | |
| | | TKPREEQYASTYRVVSVLTVLHQDWLNGKEYKCK | |
| | | VSNKALPAPIEKTISKAKGQPREPQVCTLPPSRD | |
| | | ELTKNQVSLSCAVKGFYPSDIAVEWESNGQPENN | |
| | | YKTTPPVLDSDGSFFLVSKLTVDKSRWQQGNVFS | |
| | | CSVMHEALHNHYTQKSLSLSPG | |
| [symbol] | Hole: hFc(N297A)- | DKTHTCPPCPAPELLGGPSVFLFPPKPKDTLMIS | GGGGSGGGGS |
| | IL12RB2(24-221) | RTPEVTCVVVDVSHEDPEVKFNWYVDGVEVHNAK | |
| | | TKPREEQYASTYRVVSVLTVLHQDWLNGKEYKCK | |
| | | VSNKALPAPIEKTISKAKGQPREPQVCTLPPSRD | |
| | | ELTKNQVSLSCAVKGFYPSDIAVEWESNGQPENN | |
| | | YKTTPPVLDSDGSFFLVSKLTVDKSRWQQGNVFS | |
| | | CSVMHEALHNHYTQKSLSLSPG | |
| [symbol] | Hole: hFc(N297A)- | DKTHTCPPCPAPELLGGPSVFLFPPKPKDTLMIS | GGGGSGGGGS |
| | IL12RB2(24-222) | RTPEVTCVVVDVSHEDPEVKFNWYVDGVEVHNAK | |
| | | TKPREEQYASTYRVVSVLTVLHQDWLNGKEYKCK | |
| | | VSNKALPAPIEKTISKAKGQPREPQVCTLPPSRD | |
| | | ELTKNQVSLSCAVKGFYPSDIAVEWESNGQPENN | |
| | | YKTTPPVLDSDGSFFLVSKLTVDKSRWQQGNVFS | |
| | | CSVMHEALHNHYTQKSLSLSPG | |
| [symbol] | Hole: hFc(N297A)- | DKTHTCPPCPAPELLGGPSVFLFPPKPKDTLMIS | GGGGSGGGGS |
| | IL12RB2(24-223) | RTPEVTCVVVDVSHEDPEVKFNWYVDGVEVHNAK | |
| | | TKPREEQYASTYRVVSVLTVLHQDWLNGKEYKCK | |
| | | VSNKALPAPIEKTISKAKGQPREPQVCTLPPSRD | |
| | | ELTKNQVSLSCAVKGFYPSDIAVEWESNGQPENN | |
| | | YKTTPPVLDSDGSFFLVSKLTVDKSRWQQGNVFS | |
| | | CSVMHEALHNHYTQKSLSLSPG | |
| [symbol] | Hole: hFc(N297A)- | DKTHTCPPCPAPELLGGPSVFLFPPKPKDTLMIS | GGGGSGGGGS |
| | IL12RB2(24-224) | RTPEVTCVVVDVSHEDPEVKFNWYVDGVEVHNAK | |
| | | TKPREEQYASTYRVVSVLTVLHQDWLNGKEYKCK | |
| | | VSNKALPAPIEKTISKAKGQPREPQVCTLPPSRD | |
| | | ELTKNQVSLSCAVKGFYPSDIAVEWESNGQPENN | |
| | | YKTTPPVLDSDGSFFLVSKLTVDKSRWQQGNVFS | |
| | | CSVMHEALHNHYTQKSLSLSPG | |
| [symbol] | Hole: hFc(N297A)- | DKTHTCPPCPAPELLGGPSVFLFPPKPKDTLMIS | GGGGSGGGGS |
| | IL12RB2(24-225) | RTPEVTCVVVDVSHEDPEVKFNWYVDGVEVHNAK | |
| | | TKPREEQYASTYRVVSVLTVLHQDWLNGKEYKCK | |
| | | VSNKALPAPIEKTISKAKGQPREPQVCTLPPSRD | |
| | | ELTKNQVSLSCAVKGFYPSDIAVEWESNGQPENN | |
| | | YKTTPPVLDSDGSFFLVSKLTVDKSRWQQGNVFS | |
| | | CSVMHEALHNHYTQKSLSLSPG | |
| [symbol] | Hole: hFc(N297A)- | DKTHTCPPCPAPELLGGPSVFLFPPKPKDTLMIS | GGGGSGGGGS |
| | IL12RB2(24-226) | RTPEVTCVVVDVSHEDPEVKFNWYVDGVEVHNAK | |
| | | TKPREEQYASTYRVVSVLTVLHQDWLNGKEYKCK | |
| | | VSNKALPAPIEKTISKAKGQPREPQVCTLPPSRD | |
| | | ELTKNQVSLSCAVKGFYPSDIAVEWESNGQPENN | |
| | | YKTTPPVLDSDGSFFLVSKLTVDKSRWQQGNVFS | |
| | | CSVMHEALHNHYTQKSLSLSPG | |
| [symbol] | Hole: hFc(N297A)- | DKTHTCPPCPAPELLGGPSVFLFPPKPKDTLMIS | GGGGSGGGGS |
| | IL12RB2(24-227) | RTPEVTCVVVDVSHEDPEVKFNWYVDGVEVHNAK | |
| | | TKPREEQYASTYRVVSVLTVLHQDWLNGKEYKCK | |
| | | VSNKALPAPIEKTISKAKGQPREPQVCTLPPSRD | |
| | | ELTKNQVSLSCAVKGFYPSDIAVEWESNGQPENN | |
| | | YKTTPPVLDSDGSFFLVSKLTVDKSRWQQGNVFS | |
| | | CSVMHEALHNHYTQKSLSLSPG | |
| [symbol] | Hole: hFc(N297A)- | DKTHTCPPCPAPELLGGPSVFLFPPKPKDTLMIS | GGGGSGGGGS |
| | IL12RB2(24-228) | RTPEVTCVVVDVSHEDPEVKFNWYVDGVEVHNAK | |
| | | TKPREEQYASTYRVVSVLTVLHQDWLNGKEYKCK | |
| | | VSNKALPAPIEKTISKAKGQPREPQVCTLPPSRD | |
| | | ELTKNQVSLSCAVKGFYPSDIAVEWESNGQPENN | |
| | | YKTTPPVLDSDGSFFLVSKLTVDKSRWQQGNVFS | |
| | | CSVMHEALHNHYTQKSLSLSPG | |
| [symbol] | Hole: hFc(N297A)- | DKTHTCPPCPAPELLGGPSVFLFPPKPKDTLMIS | GGGGSGGGGS |
| | IL12RB2(24-229) | RTPEVTCVVVDVSHEDPEVKFNWYVDGVEVHNAK | |
| | | TKPREEQYASTYRVVSVLTVLHQDWLNGKEYKCK | |
| | | VSNKALPAPIEKTISKAKGQPREPQVCTLPPSRD | |
| | | ELTKNQVSLSCAVKGFYPSDIAVEWESNGQPENN | |
| | | YKTTPPVLDSDGSFFLVSKLTVDKSRWQQGNVFS | |
| | | CSVMHEALHNHYTQKSLSLSPG | |
| [symbol] | Hole: hFc(N297A)- | DKTHTCPPCPAPELLGGPSVFLFPPKPKDTLMIS | GGGGSGGGGS |
| | IL12RB2(24-230) | RTPEVTCVVVDVSHEDPEVKFNWYVDGVEVHNAK | |
| | | TKPREEQYASTYRVVSVLTVLHQDWLNGKEYKCK | |
| | | VSNKALPAPIEKTISKAKGQPREPQVCTLPPSRD | |
| | | ELTKNQVSLSCAVKGFYPSDIAVEWESNGQPENN | |
| | | YKTTPPVLDSDGSFFLVSKLTVDKSRWQQGNVFS | |
| | | CSVMHEALHNHYTQKSLSLSPG | |
| [symbol] | Hole: hFc(N297A)- | DKTHTCPPCPAPELLGGPSVFLFPPKPKDTLMIS | GGGGSGGGGS |
| | IL12RB2(24-231) | RTPEVTCVVVDVSHEDPEVKFNWYVDGVEVHNAK | |
| | | TKPREEQYASTYRVVSVLTVLHQDWLNGKEYKCK | |
| | | VSNKALPAPIEKTISKAKGQPREPQVCTLPPSRD | |
| | | ELTKNQVSLSCAVKGFYPSDIAVEWESNGQPENN | |
| | | YKTTPPVLDSDGSFFLVSKLTVDKSRWQQGNVFS | |
| | | CSVMHEALHNHYTQKSLSLSPG | |
| [symbol] | Hole: hFc(N297A)- | DKTHTCPPCPAPELLGGPSVFLFPPKPKDTLMIS | GGGGSGGGGS |
| | IL12RB2(24-232) | RTPEVTCVVVDVSHEDPEVKFNWYVDGVEVHNAK | |
| | | TKPREEQYASTYRVVSVLTVLHQDWLNGKEYKCK | |
| | | VSNKALPAPIEKTISKAKGQPREPQVCTLPPSRD | |
| | | ELTKNQVSLSCAVKGFYPSDIAVEWESNGQPENN | |
| | | YKTTPPVLDSDGSFFLVSKLTVDKSRWQQGNVFS | |
| | | CSVMHEALHNHYTQKSLSLSPG | |
| [symbol] | Hole: hFc(N297A)- | DKTHTCPPCPAPELLGGPSVFLFPPKPKDTLMIS | GGGGSGGGGS |
| | IL12RB2(24-233) | RTPEVTCVVVDVSHEDPEVKFNWYVDGVEVHNAK | |
| | | TKPREEQYASTYRVVSVLTVLHQDWLNGKEYKCK | |
| | | VSNKALPAPIEKTISKAKGQPREPQVCTLPPSRD | |
| | | ELTKNQVSLSCAVKGFYPSDIAVEWESNGQPENN | |
| | | YKTTPPVLDSDGSFFLVSKLTVDKSRWQQGNVFS | |
| | | CSVMHEALHNHYTQKSLSLSPG | |

[symbol]

indicates data missing or illegible when filed

| | | Component3 | Component4 | |
|---|---|---|---|---|
| [symbol] ne | newnames | Sequence | Sequence | IL-12 p40 subunit |
| [symbol] 58 | Hole: hFc(N297A) | | | |
| [symbol] 06 | Knob: hFc(N297A)- | | SGP | IWELKKDVYVVELDWYPDAP |
| | [VPLSLY]-HIL12B- | | | GEMVVLTCDTPEEDGITWTL |
| | VPLSLY hIL12A | | | DQSSEVLGSGKTLTIQVKEF |
| | | | | GDAGQYTCHKGGEVLSHSLL |
| | | | | LLHKKEDGIWSTDILKDQKE |
| | | | | PKNKTFLRCEAKNYSGRFTC |
| | | | | WWLTTISTDLTFSVKSSRGS |
| | | | | SDPQGVTCGAATLSAERVRG |
| | | | | DNKEYEYSVECQEDSACPAA |
| | | | | EESLPIEVMVDAVHKLKYEN |
| | | | | YTSSFFIRDIIKPDPPKNLQ |
| | | | | LKPLKNSRQVEVSWEYPDTW |
| | | | | STPHSYFSLTFCVQVQGKSK |
| | | | | REKKDRVFTDKTSATVICRK |
| | | | | NASISVRAQDRYYSSSWSEW |
| | | | | ASVPCS |
| [symbol] 07 | Knob: hFc(N297A}- | | SGP | IWELKKDVYVVELDWYPDAP |
| | [VPLSLY]-hIL12B- | | | GEMVVLTCDTPEEDGITWTL |
| | VPLSLY hIL12A | | | DQSSEVLGSGKTLTIQVKEF |
| | | | | GDAGQYTCHKGGEVLSHSLL |
| | | | | LLHKKEDGIWSTDILKDQKE |
| | | | | PKNKTFLRCEAKNYSGRFTC |
| | | | | WWLTTISTDLTFSVKSSRGS |
| | | | | SDPQGVTCGAATLSAERVRG |
| | | | | DNKEYEYSVECQEDSACPAA |
| | | | | EESLPIEVMVDAVHKLKYEN |
| | | | | YTSSFFIRDIIKPDPPKNLQ |
| | | | | LKPLKNSRQVEVSWEYPDTW |
| | | | | STPHSYFSLTFCVQVQGKSK |
| | | | | REKKDRVFTDKTSATVICRK |
| | | | | NASISVRAQDRYYSSSWSEW |
| | | | | ASVPCS |
| [symbol] 09 | Hole: | CRTSECCFQDPPYPDADSGSASGPR | | |
| | hFc(N297A)- | DLRCYRISSDRYECSWQYEGPTAGV | | |
| | hCD212 | SHFLRCCL5SGRCCYFAAGSATRLQ | | |
| | (24-545) | FSDQAGVSVLYTVTLWVESWARNQT | | |
| | | EKSPEVTLQLYNSVKYEPPLGDIKV | | |
| | | SKLAGQLRMEWETPDNQVGAEVQFR | | |
| | | HRTPSSPWKLGDCGPQDDDTESCLC | | |
| | | PLEMNVAQEFQLRRRQLGSQGSSWS | | |
| | | KWSSPVCVPPENPPQPQVRFSVEQL | | |
| | | GQDGRRRLTLKEQPTQLELPEGCQG | | |
| | | LAPGTEVTYRLQLHMLSCPCKAKAT | | |
| | | RTLHLGKMPYLSGAAYNVAVISSNQ | | |
| | | FGPGLNQTWHIPADTHTEPVALNIS | | |
| | | VGTNGTTMYWPARAQSMTYCIEWQP | | |
| | | VGQDGGLATCSLTAPQDPDPAGMAT | | |
| | | YSWSRESGAMGQEKCYYITIFASAH | | |
| | | PEKLTLWSTVLSTYHFGGNASAAGT | | |
| | | PHHVSVKNHSLDSVSVDWAPSLLST | | |
| | | CPGVLKEYWRCRDEDSKQVSEHPVQ | | |
| | | PTETQVTLSGLRAGVAYTVQVRADT | | |
| | | AWLRGVWSQPQRFSIEVQVSD | | |
| [symbol] 10 | Hole: | CRTSECCFQDPPYPDADSGSASGPR | | |
| | hFc(N297A)- | DLRCYRISSDRYECSWQYEGPTAGV | | |
| | hCD212 | SHFLRCCLSSGRCCYFAAGSATRLQ | | |
| | (24-237) | FSDQAGVSVLYTVTLWVESWARNQT | | |
| | | EKSPEVTLQLYNSVKYEPPLGDIKV | | |
| | | SKLAGQLRMEWETPDNQVGAEVQFR | | |
| | | HRTPSSPWKLGDCGPQDDDTESCLC | | |
| | | PLEMNVAQEFQLRRRQLGSQGSSWS | | |
| | | KWSSPVCVPPENP | | |
| [symbol] 25 | Hole: hFc(N297A)- | KIDACKRGDVTVKPSHVILL | | |
| | IL12RB2(24-622) | GSTVNITCSLKPRQGCFHYS | | |
| | | RRNKLILYKFDRRINFHHGH | | |
| | | SLNSQVTGLPLGTTLFVCKL | | |
| | | ACSNSDEIQICGAEIFVGVA | | |
| | | PEQPQNLSCIQKGEQGTVAC | | |
| | | TWERGRDTHLYTEYTLQLSG | | |
| | | PKNLTWQKQCKDIYCDYLDF | | |
| | | GINLTPESPESNFTAKVTAV | | |
| | | NSLGSSSSLPSTFTFLDIVR | | |
| | | PLPPWDIRSKFQKASVSRCT | | |
| | | LYWRDEGLVLLNRLRYRPSN | | |
| | | SRLWNMVNVTKAKGRHDLLD | | |
| | | LKPFTEYEFQISSKLHLYKG | | |
| | | SWSDWSESLRAQTPEEEPTG | | |
| | | MLDVWYMKRHIDYSRQQISL | | |
| | | FWKNLSVSEARGKILHYQVT | | |
| | | LQELTGGKAMTQNITGHTSW | | |
| | | TTVIPRTGNWAVAVSAANSK | | |
| | | GSSLPTRINIMNLCEAGLLA | | |
| | | PRQVSANSEGMDNILVTWQP | | |
| | | PRKDPSAVQEYWEWRELHPG | | |
| | | GDTQVPLNWLRSRPYNVSAL | | |
| | | ISENIKSYICYEIRVYALSG | | |
| | | DQGGCSSILGNSKHKAPLSG | | |
| | | PHINAITEEKGSILISWNSI | | |
| | | PVQEQMGCLLHYRIYWKERD | | |
| | | SNSQPQLCEIPYRVSQNSHP | | |
| | | INSLQPRVTYVLWMTALTAA | | |
| | | GESSHGNEREFCLQGKAN | | |
| [symbol] 26 | Hole: hFc(N297A)- | KIDACKRGDVTVKPSHVILL | | |
| | IL12RB2(24-319) | GSTVNITCSLKPRQGCFHYS | | |
| | | RRNKLILYKFDRRINFHHGH | | |
| | | SLNSQVTGLPLGTTLFVCKL | | |
| | | ACSNSDE | | |
| | | IQICGAEIFVGVAPEQPQNL | | |
| | | SCIQKGEQGTVACTWERGRD | | |
| | | THLYTEYTLQLSGPKNLTWQ | | |
| | | KQCKDIYCDYLDFGINLTPE | | |
| | | SPESNFTAKVTAVNSLGSSS | | |
| | | SLPSTFTFLDIVRPLPPWDI | | |
| | | RIKFQKASVSRCTLYWRDEG | | |
| | | LVLLNRLRYRPSNSRLWNMV | | |
| | | NVTKAKGRHDLLDLKPFTEY | | |
| | | EFQISSKLHLYKGSWSDWSE | | |
| | | SLRAQTPEE | | |
| [symbol] 39 | Hole: hFc(N297A)- | KIDACKRGDVTVKPSHVILL | | |
| | IL12RB2(24-222) | GSTVNITCSLKPRQGCFHYS | | |
| | | RRNKLILYKFDRRINFHHGH | | |
| | | SLNSQVTGLPLGTTLFVCKL | | |
| | | ACSNSDEIQICGAEIFVGVA | | |
| | | PEQPQNLSCIQKGEQGTVAC | | |
| | | TWERGRDTHLYTEYTLQLSG | | |
| | | PKNLTWQKQCKDIYCDYLDF | | |
| | | GINLTPESPESNFTAKVTAV | | |
| | | NSLGSSSSLPSTFTFLDIV | | |
| [symbol] 40 | Hole: hFc(N297A)- | KIDACKRGDVTVKPSHVILLG | | |
| | IL12RB2(24-31S) | STVNITCSLKPRQGCFHYSR | | |
| | | RNKLILYKFDRRINFHHGHS | | |
| | | LNSQVTGLPLGTTLFVCKLA | | |
| | | CINSDE | | |
| | | IQICGAEIFVGVAPEQPQNL | | |
| | | SCIQKGEQGTVACTWERGRD | | |
| | | THLYTEYTLQLSGPKNLTWQ | | |
| | | KQCKDIYCDYLDFGINLTPE | | |
| | | SPESNFTAKVTAVNSLGSSS | | |
| | | SLPSTFTFLDIVRPLPPWDI | | |
| | | RIKFQKASVSRCTLYWRDEG | | |
| | | LVLLNRLRYRPSNSRLWNMV | | |
| | | NVTKAKGRHDLLDL | | |
| | | KPFTEYEFQISSKLHLYKGS | | |
| | | WSDWSESLRAQTPEE | | |
| [symbol] 41 | Hole: hFc(N297A)- | KIDAC | | |
| | IL12RB2(24-319) | KRGDVTVKPSHVILLGSTVN | | |
| | | ITCSLKPRQGCFHYSRRNKL | | |
| | | ILYKFDRRINFHHGHSLNSQ | | |
| | | VTGLPLGTTLFVCKLACINS | | |
| | | DE | | |
| | | IQICGAEIFVGVAPEQPQNL | | |
| | | SCIQKGEQGTVACTWERGRD | | |
| | | THLYTEYTLQLSGPKNLTWQ | | |
| | | KQCKDIYCDYLDFGINLTPE | | |
| | | SPESNFTAKVTAVNSLGSSS | | |
| | | SLPSTFTFLDIVRPLPPWDI | | |
| | | RIKFQKASVSRCTLYWRDEG | | |
| | | LVLLNRLRYRPSNSRLWNMV | | |
| | | NVTKAKGRHDLLDLKPFTEY | | |
| | | EFQISSKLHLYKGSWSDWSE | | |
| | | SLRAQTPEE | | |
| [symbol] 29 | Hole: | KIDACKRGDVTVKPSHVILL | | |
| | hFc(N297A)- | GSTVNITCSLKPRQGCFHYS | | |
| | IL12RB2(24-212) | RRN | | |
| | | KLILYKFDRRINFHHGHSLN | | |
| | | SQVTGLPLGTTLFVCKLACI | | |
| | | NSDEIQICGAEIFVGVAPEQ | | |
| | | PQNLSCIQKGEQGTVACTWE | | |
| | | RGRDTHLYTEYTLQLSGPKN | | |
| | | LTWQKQCKDIYCDYLDFGIN | | |
| | | LTPESPESNFTAKVTAVNSL | | |
| | | GSSSSLKIDACKRGDVTVKP | | |
| | | SHVILLGSTVNITCSLKPRQ | | |
| | | GCFHYSRRN | | |
| [symbol] 44 | Hole: | KLILYKFDRRINFHHGHSLN | | |
| | hFc(N297A)- | SQVTGLPLGTTLFVCKLACI | | |
| | IL12RB2(24-222) | NSDEIQICGAEIFVGVAPEQ | | |
| | | PQNLSCIQKGEQGTVACTWE | | |
| | | RGRDTHLYTEYTLQLSGPKN | | |
| | | LTWQKQCKDIYCDYLDFGIN | | |
| | | LTPESPESNFTAKVTAVNSL | | |
| | | GSSSSLPSTFTFLDIVKIDA | | |
| | | CKRGDVTVKPSHVILLGSTV | | |
| | | NITCSLKPRQGCFHYSRRN | | |
| [symbol] 27 | Hole: | KLILYKFDRRINFHHGHSLN | | |
| | hFc(N297A)- | SQVTGLPLGTTLFVCKLACI | | |
| | IL12RB2(24-210) | NSDEIQICGAEIFVGVAPEQ | | |
| | | PQNLSCIQKGEQGTVACTWE | | |
| | | RGRDTHLY | | |
| | | TEYTLQLSGPKNLTWQKQCK | | |
| | | DIYCDYLDFGINLTPESPES | | |
| | | NFTAKVTAVNSLGSSS | | |
| | | KIDACKRGDVTVKPSHVILL | | |
| | | GSTVNITCSLKPRQGCFHYS | | |
| | | RRN | | |
| [symbol] 28 | Hole: | KLILYKFDRRINFHHGHSLN | | |
| | hFc(N297A)- | SQVTGLPLGTTLFVCKLACI | | |
| | IL12RB2(24-211) | NSDEIQICGAEIFVGVAPEQ | | |
| | | PQNLSCIQKGEQGTVACTWE | | |
| | | RGRDTHLYTEYTLQLSGPKN | | |
| | | LTWQKQCKDIYCDYLDFGIN | | |
| | | LTPESPESNFTAKVTAVNSL | | |
| | | GSSKIDACKRGDVTVKPSHV | | |
| | | ILLGSTVNITCSLKPRQGCF | | |
| | | HYSRRN | | |
| [symbol] 29 | Hole: | KLILYKFDRRINFHHGHSLN | | |
| | hFc(N297A)- | SQVTGLPLGTTLFVCKLACI | | |
| | IL12RB2(24-212) | NSDEIQICGAEIFVGVAPEQ | | |
| | | PQNLSCIQKGEQGTVACTWE | | |
| | | RGRDTHLYTEYTLQLSGPKN | | |
| | | LTWQKQCKDIYCDYLDFGIN | | |
| | | LTPESPESNFTAKVTAVNSL | | |
| | | GSSSSLKIDACKRGDVTVKP | | |
| | | SHVILLGSTVNITCSLKPRQ | | |
| | | GCFHYSRRN | | |
| [symbol] 30 | Hole: | KLILYKFDRRINFHHGHSLNS | | |
| | hFc(N297A)- | QVTGLPLGTTLFVCKLACIN | | |
| | IL12RB2(24-213) | SDEIQICGAEIFVGVAPEQP | | |
| | | QNLSCIQKGEQGTVACTWER | | |
| | | GRDTHLYTEYTLQLSGPKNL | | |
| | | TWQKQCKDIYCDYLDFGINL | | |
| | | TPESPESNFTAKVTAVNSLG | | |
| | | SSSSLP | | |
| [symbol] 31 | Hole: hFc(N297A)- | KIDACKRGDVTVKPSHVILL | | |
| | IL12RB2(24-214) | GSTVNITCSLKPRQGCFHYS | | |
| | | RRNKLILYKFDRRINFHHGH | | |
| | | SLNSQVTGLPLGTTLFVCKL | | |
| | | ACINSDEIQICGAEIFVGVA | | |
| | | PEQPQNLSCIQKGEQGTVAC | | |
| | | TWERGRDTHLYTEYTLQLSG | | |
| | | PKNLTWQKQCKDIYCDYLDF | | |
| | | GINLTPESPESNFTAKVTAV | | |
| | | NSLGSSSSLPS | | |
| [symbol] 32 | Hole: hFc(N297A)- | KIDACKRGDVTVKPSHVILL | | |
| | IL12RB2(24-215) | GSTVNITCSLKPRQGCFHYS | | |
| | | RRNKLILYKFDRRINFHHGH | | |
| | | SLNSQVTGLPLGTTLFVCKL | | |
| | | ACINSDEIQICGAEIFVGVA | | |
| | | PEQPQNLSCIQKGEQGTVAC | | |
| | | TWERGRDTHLYTEYTLQLSG | | |
| | | PKNLTWQKQCKDIYCDYLDF | | |
| | | GINLTPESPESNFTAKVTAV | | |
| | | NSLGSSSSLPSI | | |
| [symbol] 33 | Hole: hFc(N297A)- | KIDACKRGDVTVKPSHVILL | | |
| | IL12RB2(24-216) | GSTVNITCSLKPRQGCFHYS | | |
| | | RRIMKLILYKFDRRINFHHG | | |
| | | HSLNSQVTGLPLGTTLFVCK | | |
| | | LACINSDEIQICGAEIFVGV | | |
| | | APEQPQNLSCIQKGEQGTVA | | |
| | | CTWERGRDTHLYTEYTLQLS | | |
| | | GPKNLTWQKQCKDIYCDYLD | | |
| | | FGINLTPESPESNFTAKVTA | | |
| | | VNSLGSSSSLPSTF | | |
| [symbol] 34 | Hole: hFc(N297A)- | KIDACKRGDVTVKPSHVILL | | |
| | IL12RB2(24-217) | GSTVNITCSLKPRQGCFHYS | | |
| | | RRNKLILYKFDRRINFHHGH | | |
| | | SLNSQVTGLPLGTTLFVCKL | | |
| | | ACINSDEIQICGAEIFVGVA | | |
| | | PEQPQNLSCIQKGEQGTVAC | | |
| | | TWERGRDTHLYTEYTLQLSG | | |
| | | PKNLTWQKQCKDIYCDYLDF | | |
| | | GINLTPESPESNFTAKVTAV | | |
| | | NSLGSSSSLPSTFT | | |
| [symbol] 35 | Hole: hFc(N297A)- | KIDACKRGDVTVKPSHVILL | | |
| | IL12RB2(24-218) | GSTVNITCSLKPRQGCFHYS | | |
| | | RRNKLILYKFDRRINFHHGH | | |
| | | SLNSQVTGLPLGTTLFVCKL | | |
| | | ACINSDEIQICGAEIFVGVA | | |
| | | PEQPQNLSCIQKGEQGTVAC | | |
| | | TWERGRDTHLYTEYTLQLSG | | |
| | | PKNLTWQKQCKDIYCDYLDF | | |
| | | GINLTPESPESNFTAKVTAV | | |
| | | NSLGSSSSLPSTFTF | | |
| [symbol] 36 | Hole: hFc(N297A)- | KIDACKRGDVTVKPSHVILL | | |
| | IL12RB2(24-219) | GSTVNITCSLKPRQGCFHYS | | |
| | | RRNKLILYKFDRRIIMFHHG | | |
| | | HSLNSQVTGLPLGTTLFVCK | | |
| | | LACINSDEIQICGAEIFVGV | | |
| | | APEQPQNLSCIQKGEQGTVA | | |
| | | CTWERGRDTHLYTEYTLQLS | | |
| | | GPKNLTWQKQCKDIYCDYLD | | |
| | | FGINLTPESPESNFTAKVTA | | |
| | | VNSLGSSSSLPSTFTFL | | |
| [symbol] 37 | Hole: hFc(N297A)- | KIDACKRGDVTVKPSHVILL | | |
| | IL12RB2(24-220) | GSTVNITCSLKPRQGCFHYS | | |
| | | RRNKLILYKFDRRINFHHGH | | |
| | | SLNSQVTGLPLGTTLFVCKL | | |
| | | ACINSDEIQICGAEIFVGVA | | |
| | | PEQPQNLSCIQKGEQGTVAC | | |
| | | TWERGRDTHLYTEYTLQLSG | | |
| | | PKNLTWQKQCKDIYCDYLDF | | |
| | | GINLTPESPESNFTAKVTAV | | |
| | | NSLGSSSSLPSTFTFLD | | |
| [symbol] 38 | Hole: hFc(N297A)- | KIDACKRGDVTVKPSHVILL | | |
| | IL12RB2(24-221) | GSTVNITCSLKPRQGCFHYS | | |
| | | RRNKLILYKFDRRLNFHHGH | | |
| | | SLNSQVTGLPLGTTLFVCKL | | |
| | | ACINSDEIQICGAEIFVGVA | | |
| | | PEQPQNLSCIQKGEQGTVAC | | |
| | | TWERGRDTHLYTEYTLQLSG | | |
| | | PKNLTWQKQCKDIYCDYLDF | | |
| | | GINLTPESPESNFTAKVTAV | | |
| | | NSLGSSSSLPSTFTFLDI | | |
| [symbol] 39 | Hole: hFc(N297A)- | KIDACKRGDVTVKPSHVILL | | |
| | IL12RB2(24-222) | GSTVNITCSLKPRQGCFHYS | | |
| | | RRNKLILYKFDRRINFHHGH | | |
| | | SINSQVTGLPLGTTLFVCKL | | |
| | | ACINSDEIQICGAEIFVGVA | | |
| | | PEQPQNLSCIQKGEQGTVAC | | |
| | | TWERGRDTHLYREYTLQLSG | | |
| | | PKNLTWQKQCKDIYCDYLDF | | |
| | | GINLTPESPESNFTAKVTAV | | |
| | | NSLGSSSSLPSTFTFLDIV | | |
| [symbol] 40 | Hole: hFc(N297A)- | KIDACKRGDVTVKPSHVILL | | |
| | IL12RB2(24-223) | GSTVNITCSLKPRQGCFHYS | | |
| | | RRNKLILYKFDRRINFHHGH | | |
| | | SLNSQVTGLPLGTTLFVCKL | | |
| | | ACINSDEIQICGAEIFVGVA | | |
| | | PEQPQNLSCIQKGEQGTVAC | | |
| | | TWERGRDTHLYTEYTLQLSG | | |
| | | PKNLTWQKQCKDIYCDYLDF | | |
| | | GINLTPESPESNSFTAKVTA | | |
| | | VNSLGSSSSLPSTFTFLDIV | | |
| | | R | | |
| [symbol] 41 | Hole: hFc(N297A)- | KIDACKRGDVTVKPSHVILL | | |
| | IL12RB2(24-224) | GSTVNITCSLKPRQGCFHYS | | |
| | | RRNKLILYKFDRRINFHHGH | | |
| | | SLNSQVTGLPLGTTLFVCKL | | |
| | | ACINSDEIQICGAEIFVGVA | | |
| | | PEQPQNLSCIQKGEQGTVAC | | |
| | | TWERGRDTHLYTEYTLQLSG | | |
| | | PKNLTWQKQCKDIYCDYLDF | | |
| | | GINLTPESPESNFTAKVTAV | | |
| | | NSLGSSSSLPSTFTFLDIVR | | |
| | | P | | |
| [symbol] 42 | Hole: hFc(N297A)- | KIDACKRGDVTVKPSHVILL | | |
| | IL12RB2(24-225) | GSTVNITCSLKPRQGCFHYS | | |
| | | RRNKLILYKFDRRINFHHGH | | |
| | | SLNSQVTGLPLGTTLFVCKL | | |
| | | ACINSDEIQICGAEIFVGVA | | |
| | | PEQPQNLSCIQKGEQGTVAC | | |
| | | TWERGRDTHLYTEYTLQLSG | | |
| | | PKNLTWQKQCKDIYCDYLDF | | |
| | | GINLTPESPESNFTAKVTAV | | |
| | | NSLGSSSSLPSTFTFLDIVR | | |
| | | PL | | |
| [symbol] 43 | Hole: hFc(N297A)- | KIDACKRGDVTVKPSHVILL | | |
| | IL12RB2(24-226) | GSTVNITCSLKPRQGCFHYS | | |
| | | RRNKLILYKFDRRINFHHGH | | |
| | | SLNSQVTGLPLGTTLFVCKL | | |
| | | ACINSDEIQICGAFIFVGVA | | |
| | | PEQPQNLSCIQKGEQGTVAC | | |
| | | TWERGRDTHLYTEYTLQLSG | | |
| | | PKNLTWQKQCKDIYCDYLDF | | |
| | | GINLTPESPESNFTAKVTAV | | |
| | | NSLGSSSSLPSTFTFLDIVR | | |
| | | PLP | | |
| [symbol] 44 | Hole: hFc(N297A)- | KIDACKRGDVTVKPSHVILL | | |
| | IL12RB2(24-227) | GSTVNITCSLKPRQGCFHYS | | |
| | | RRNKLILYKFDRRINFHHGH | | |
| | | SLNSQVTGLPLGTTLFVCKL | | |
| | | ACINSDEIQICGAEIFVGVA | | |
| | | PEQPQNLSCIQKGEQGTVAC | | |
| | | TWERGRDTHLYTEYTLQL5G | | |
| | | PKNLTWQKQCKDIYCDYLDF | | |
| | | GINLTPESPESNFTAKVTAV | | |
| | | NSLGSSSSLPSTFTFLDIVR | | |
| | | PLPP | | |
| [symbol] 45 | Hole: hFc(N297A)- | KIDACKRGDVTVKPSHVILL | | |
| | IL12RB2(24-228) | GSTVNITCSLKPRQGCFHYS | | |
| | | RRNKLILYKFDRRINFHHGH | | |
| | | SLNSQVTGLPLGTTLFVCKL | | |
| | | ACSNSDEIQICGAEIFVGVA | | |
| | | PEQPQNLSCIQKGEQGTVAC | | |
| | | TWERGRDTHLYTEYTLQLSG | | |
| | | PKNLTWQKQCKDIYCDYLDF | | |
| | | GINLTPESPESNFTAKVTAV | | |
| | | NSLGSSSSLPSTFTFLDIVR | | |
| | | PLPPW | | |
| [symbol] 46 | Hole: hFc(N297A)- | KIDACKRGDVTVKPSHVILL | | |
| | IL12RB2(24-229) | GSTVNITCSLKPRQGCFHYS | | |
| | | RRNKLILYKFDRRINFHHGH | | |
| | | SLNSQVTGLPLGTTLFVCKL | | |
| | | ACINSDEIQICGAEIFVGVA | | |
| | | PEQPQNLSCIQKGEQGTVAC | | |
| | | TWERGRDTHLYTEYTLQLSG | | |
| | | PKNLTWQKQCKDIYCDYLDF | | |
| | | GINLTPESPESNFTAKVTAV | | |
| | | NSLGSSSSLPSTFTFLDIVR | | |
| | | PLPPWD | | |
| [symbol] 47 | Hole: hFc(N297A)- | KIDACKRGDVTVKPSHVILL | | |
| | IL12RB2(24-230) | GSTVNITCSLKPRQGCFHYS | | |
| | | RRNKLILYKFDRRINFHHGH | | |
| | | SLNSQVTGLPLGTTLFVCKL | | |
| | | ACINSDEIQICGAEIFVGVA | | |
| | | PEQPQNLSCIQKGEQGTVAC | | |
| | | TWERGRDTHLYTEYTLQLSG | | |
| | | PKNLTWQKQCKDIYCDYLDF | | |
| | | GINLTPESPESNFTAKVTAV | | |
| | | NSLGSSSSLPSTFTFLDIVR | | |
| | | PLPPWDI | | |
| [symbol] 48 | Hole: hFc(N297A)- | KLDACKRGDVTVKPSHVILL | | |
| | IL12RB2(24-231) | GSTVNITCSLKPRQGCFHYS | | |
| | | RRNKLILYKFDRRINFHHGH | | |
| | | SLNSQVTGLPLGTTLFVCKL | | |
| | | ACINSDEIQICGAEIFVGVA | | |
| | | PFQPQNLSCIQKGEQGTVAC | | |
| | | TWERGRDTHLYTEYTLQLSG | | |
| | | PKNLTWQKQCKDIYCDYLDF | | |
| | | GINLTPESPESNFTAKVTAV | | |
| | | NSLGSSSSLPSTFTFLDIVR | | |
| | | PLPPWDIR | | |
| [symbol] 49 | Hole: hFc(N297A)- | KIDACKRGDVTVKPSHVILL | | |
| | IL12RB2(24-232) | GSTVNITCSLKPRQGCFHYS | | |
| | | RRNKLILYKFDRRINFHHGH | | |
| | | SLNSQVTGLPLGTTLFVCKL | | |
| | | ACINSDEIQICGAEIFVGVA | | |
| | | PEQPQNLSCIQKGEQGTVAC | | |
| | | TWERGRDTHLYTEYTLQLSG | | |
| | | PKNLTWQKQCKDIYCDYLDF | | |
| | | GINLTPESPESNFTAKVTAV | | |
| | | NSLGSSSSLPSTETFLDSVR | | |
| | | PLPPWDIRI | | |
| [symbol] 50 | Hole: hFc(N297A)- | KIDACKRGDVTVKPSHVILL | | |
| | IL12RB2(24-233) | GSTVNITCSLKPRQGCFHYS | | |
| | | RRNKLILYKFDRRINFHHGH | | |
| | | SLNSQVTGLPLGTTLFVCKL | | |
| | | ACINSDEIQICGAEIFVGVA | | |
| | | PEQPQNLSCIQKGEQGTVAC | | |
| | | TWERGRDTHLYTEYTLQLSG | | |
| | | PKNLTWQKQCKDIYCDYLDF | | |
| | | GINLTPESPESNFTAKVTAV | | |
| | | NSLGSSSSLPSTFTFLDIVR | | |
| | | PLPPWDIRIK | | |

[symbol]

indicates data missing or illegible when filed

| | | | IL-12 p35 | Released by |
|---|---|---|---|---|
| [symbol] ne | newnames | Linker | subunit | cleavage |
| [symbol] 06 | Knob: | GGGGSGGG | RNLPVATPDPGMFPC | LYSGPIWELKKDVYW |
| | hFc(N297A)- | GSGGGGS | LHHSQNLLRAVSNML | ELDWYPDAPGEMWLT |
| | [VPLSLY]- | | QKARQTLEFYPCTSE | CDTPEEDGITWTLDQ |
| | hIL12B- | | EIDHEDITKDKTSTV | SSEVLGSGKTLTIQV |
| | hIL12A | | EACLPLELTKNESCL | KEFGDAGQYTCHKGG |
| | | | NSRETSFITNGSCLA | EVLSHSLLLLHKKED |
| | | | SRKTSFMMALCLSSI | GIWSTDILKDQKEPK |
| | | | YEDLKMYQVEFKTMN | NKTFLRCEAKNYSGR |
| | | | AKLLMDPKRQIFLDQ | FTCWWLTTISTDLTF |
| | | | NMLAVIDELMQALNF | SVKSSRGSSDPQGVT |
| | | | NSETVPQKSSLEEPD | CGAATLSAERVRGDN |
| | | | FYKTKIKLCILLHAF | KEYEYSVECQEDSAC |
| | | | RIRAVTIDRVMSYLN | PAAEESLPIEVMVDA |
| | | | AS | VHKLKYENYTSSFFI |
| | | | | RDIIKPDPPKNIQLK |
| | | | | PLKNSRQVEVSWEYP |
| | | | | DTWSTPHSYFSLTFC |
| | | | | VQVQGKSKREKKDRV |
| | | | | FTDKTSATVICRKNA |
| | | | | SISVRAQDRYYSSSW |
| | | | | SEWASVPCSGGGGSG |
| | | | | GGGSGGGGSRNLPVA |
| | | | | TPDPGMFPCLHHSQN |
| | | | | LLRAVSNMLQKARQT |
| | | | | LEFYPCTSEEIDHED |
| | | | | ITKDKTSTVEACLPL |
| | | | | ELTKNESCLNSRETS |
| | | | | FITNGSCLASRKTSF |
| | | | | MMALCLSSIYEDLKM |
| | | | | YQVEFKTMNAKILMD |
| | | | | PKRQIFLDQNMLAVI |
| | | | | DELMQALNFNSETVP |
| | | | | QKSSLEEPDFYKTKI |
| | | | | KLCILLHAFRIRAVT |
| | | | | IDRVMSYLNAS |
| [symbol] 07 | Knob: | GGGGSGGG | RNLPVATPDPGMFPC | LYSGPIWELKKDVYW |
| | hFc(N297A)- | GSGGGGS | LHHSQNLLRAVSNML | ELDWYPDAPGEMVVL |
| | [VPLSLY]- | | QKARQTLEFYPCTSE | TCDTPEEDGITWTLD |
| | hIL12B- | | EIDHEDITKDKTSTV | QSSEVLGSGKTLTIQ |
| | hIL12A | | FACLPLELTKNFSCL | VKEFGDAGQYTCHKG |
| | | | NSRETSFITNGSCL | GEVLSHSLLLLHKKE |
| | | | ASRKTSFMMALCLSS | DGIWSTDILKDQKEP |
| | | | IYEDLKMYQVEFKTM | KNKTFLRCEAKNYSG |
| | | | NAKLLMDPKRQIFLD | RFTCWWLTTISTDLT |
| | | | QNMLAVIDELMQALN | FSVKSSRGSSDPQGV |
| | | | FNSETVPQKSSLEEP | TCGAATLSAERVRGD |
| | | | DFYKTKIKLCILLHA | NKEYEYSVECQEDSA |
| | | | FRIRAVTIDRVMSYL | CPAAEESLPIEVMVD |
| | | | NAS | AVHKLKYENYTSSFF |
| | | | | IRDIIKPDPPKNLQL |
| | | | | KPLKNSRQVEVSWEY |
| | | | | PDTWSTPHSYFSLTF |
| | | | | CVQVQGKSKREKKDR |
| | | | | VFTDKTSATVICRKN |
| | | | | ASISVRAQDRYYSSS |
| | | | | WSEWASVPCSGGGGS |
| | | | | GGGGSGGGGSRNLPV |
| | | | | ATPDPGMFPCLHHSQ |
| | | | | NLLRAVSNMLQKARQ |
| | | | | TLEFYPCTSEEIDHE |
| | | | | DITKDKTSTVEACLP |
| | | | | LELTKNESCLNSRET |
| | | | | SFITNGSCLASRKTS |
| | | | | FMMALCLSSIYEDLK |
| | | | | MYQVEFKTMNAKLLM |
| | | | | DPKRQIFLDQNMLAV |
| | | | | IDELMQALNFNSETV |
| | | | | PQKSSLEEPDFYKTK |
| | | | | IKLCILLHAFRIRAV |
| | | | | TIDRVMSYLNAS |

[symbol]

indicates data missing or illegible when filed

| [symbol] ne | newnames | Linker | FullSequence |
|---|---|---|---|
| [symbol] 58 | Hole: | | DKTHTCPPCPAPELLGGPSVFLFPPKPKDTLMISRTPEVTCVVVDVSHED |
| | HFc(N297A) | | PEVKFNWYVDGVEVHNAKTKPREEQYASTYRVVSVLTVLHQDWLNGKEYK |
| | | | CKVSNKALPAPIEKTISKAKGQPREPQVCTLPPSRDELTKNQVSLSCAVK |
| | | | GFYPSDIAVEWESNGQPENNYKTTPPVLDSDGSFFLVSKLTVDKSRWQQG |
| [symbol] 06 | | | NVFSCSVMHEALHNHYTQKSLSLSPG |
| | Knob: | GGGGSGGG | DKTHTCPPCPAPELLGGPSVFLFPPKPKDTLMISRTPEVTCVVVDVSHED |
| | hFC(N297A) | GSGGGGS | PEVKFNWYVDGVEVHNAKTKPREEQYASTYRVVSVLTVLHQDWLNGKEYK |
| | [VPLSLY]- | | CKVSNKALPAPIEKTISKAKGQPREPQVYTLPPCRDELTKNQVSLWCLVK |
| | hIL12B- | | GFYPSDIAVEWESNGQPENNYKTTPPVLDSDGSFFLYSKLTVDKSRWQQG |
| | hIL12A | | NVFSCSVMHEALHNHYTQKSLSLSPGGGSGGSVPLSLYSGPIWELKKDVY |
| | | | VVELDWYPDAPGEMVVLTCDTPEEDGITWTLDQSSEVLGSGKTLTIQVKE |
| | | | FGDAGQYTCHKGGEVLSHSLLLLHKKEDGIWSTDILKDQKEPKNKTFLRC |
| | | | EAKNYSGRFTCWWLTTISTDLTFSVKSSRGSSDPQGVTCGAATLSAERVR |
| | | | GDNKEYEYSVECQEDSACPAAEESLPIEVMVDAVHKLKYENYTSSFFIRD |
| | | | IIKPDPPKNLQLKPLKNSRCIVEVSWEYPDTWSTPHSYFSLTFCVQVQGK |
| | | | SKREKKDRVFTDKTSATVICRKNASISVRAQDRYYSSSWSEWASVPCSGG |
| | | | GGSGGGGSGGGGSRNLPVATPDPGMFPCLHHSQNLLRAVSNMLQKARQTL |
| | | | EFYPCTSEEIDHEDITKDKTSTVEACLPLELTKNESCLNSRETSFITNGS |
| | | | CLASRKTSFMMALCLSSIYEDLKMYQVEFKTMNAKLLMDPKRQIFLDQNM |
| | | | LAVIDELMQALNFNSETVPQKSSLEEPDFYKTKIKLCILLHAFRIRAVTI |
| | | | DRVMSYLNAS |
| [symbol] 07 | Knob: | GGGGSGGG | DKTHTCPPCPAPELLGGPSVFLFPPKPKDTLMISRTPEVTCVVVDVSHED |
| | hFc N297A | GSGGGGS | PEVKFNWYVDGVEVHNAKTKPREEQYASTYRVVSLTVLHQDWLNGKEYKC |
| | [VPLSLY]- | | KVSNKALPAPIEKTISKAKGQPREPQVYTLPPCRDELTKNQVSLWCLVKG |
| | hIL12B- | | FYPSDIAVEWESNGQPENNYKTTPPVLDSDGSFFLYSKLTVDKSRWQQGN |
| | hIL12A | | VFSCSVMHEALHNHYTQKSLSLSPGGGSGGSGGSVPLSLYSGPIWELKKD |
| | | | VYVVELDWYPDAPGEMVVLTCDTPEEDGITWTLDQSSEVLGSGKTLTICL |
| | | | VKEFGDAGCLYTCHKGGEVLSHSLLLLHKKEDGIWSTDILKDQKEPKNKT |
| | | | FLRCEAKNYSGRFTCWWLTTISTDLTFSVKSSRGSSDPQGVTCGAATLSA |
| | | | ERVRGDNKEYEYSVECQEDSACPAAEESLPIEVMVDAVHKLKYENYTSSF |
| | | | FIRDIIKPDPPKNLQLKPLKNSRQVEVSWEYPDTWSTPHSYFSLTFCVQV |
| | | | QGKSKREKKDRVFTDKTSATVICRKNASISVRAQDRYYSSSWSEWASVPC |
| | | | SGGGGSGGGGSGGGGSRNLPVATPDPGMFPCLHHSQNLLRAVSNMLQKAR |
| | | | QTLEFYPCTSEEIDHEDITKDKTSTVEACLPLELTKNESCLNSRETSFIT |
| | | | NGSCLASRKTSFMMALCLSSIYEDLKMYQVEFKTMNAKLLMDPKRQIFLD |
| | | | CLNMLAVIDELMQALNFNSETVPQKSSLEEPDFYKTKIKLCILLHAFRIR |
| | | | AVTIDRVMSYLNAS |
| [symbol] 09 | Hole: | | DKTHTCPPCPAPELLGGPSVFLFPPKPKDTLMISRTPEVTCVVVDVSHED |
| | hFc(N297A)- | | PEVKFNWYVDGVEVHNAKTKPREEQYASTYRVVSVLTVLHQDWLNGKEYK |
| | hCD212(24- | | CKVSNKALPAPIEKTISKAKGQPREPQVCTLPPSRDELTKNQVSLSCAVK |
| | 545) | | GFYPSDIAVEWESNGQPENNYKTTPPVLDSDGSFFLVSKLTVDKSRWQQG |
| | | | NVFSCSVMHEALHNHYTQKSLSLSPGGGGGSGGGGSCRTSECCFQDPPYP |
| | | | DADSGSASGPRDLRCYRISSDRYECSWQYEGPTAGVSHFLRCCLSSGRCC |
| | | | YFAAGSATRLQFSDQAGVSVLYTVTLWVESWARNQTEKSPEVTLQLYNSV |
| | | | KYEPPLGDIKVSKLAGQLRMEWETPDNQVGAEVQFRHRTPSSPWKLGDCG |
| | | | PQDDDTESCLCPLEMNVAQEFQLRRRQLGSQGSSWSKWSSPVCVPPENPP |
| | | | QPQVRFSVEQLGQDGRRRLTLKEQPTQLELPEGCQGLAPGTEVTYRLQLH |
| | | | MLSCPCKAKATRTLHLGKMPYLSGAAYNVAVISSNQFGPGLNQTWHIPAD |
| | | | THTEPVALNISVGTNGTTMYWPARAQSMTYCIEWQPVGQDGGLATCSLTA |
| | | | PQDPDPAGMATYSWSRESGAMGQEKCYYITIFASAHPEKLTLWSTVLSTY |
| | | | HFGGNASAAGTPHHVSVKNHSLDSVSVDWAPSLLSTCPGVLKEYVVRCRD |
| | | | EDSKQVSEHPVQPTETQVTLSGLRAGVAYTVQVRADTAWLRGVWSQPQRF |
| | | | SIEVQVSD |
| [symbol] 10 | Hole: | | DKTHTCPPCPAPELLGGPSVFLFPPKPKDTLMISRTPEVTCVVVDVSHED |
| | hFc(N297A)- | | PEVKFNWYVDGVEVHNAKTKPREEQYASTYRVVSVLTVLHQDWLNGKEYK |
| | hCD212(24- | | CKVSNKALPAPIEKTISKAKGQPREPQVCTLPPSRDELTKNQVSLSCAVK |
| | 237) | | GFYPSDIAVEWESNGQPENNYKTTPPVLDSDGSFFLVSKLTVDKSRWQQG |
| | | | NVFSCSVMHEALHNHYTQKSLSLSPGGGGGSGGGGSCRTSECCFQDPPYP |
| | | | DADSGSASGPRDLRCYRISSDRYECSWQYEGPTAGVSHFLRCCLSSGRCC |
| | | | YFAAGSATRLQFSDQAGVSVLYTVTLWVESWARNQTEKSPEVTLQLYNSV |
| | | | KYEPPLGDIKVSKLAGQLRMEWETPDNQVGAEVQFRHRTPSSPWKLGDCG |
| | | | PQDDDTESCLCPLEMNVAQEFQLRRRQLGSQGSSWSKWSSPVCVPPENP |
| [symbol] 25 | Hole: | | DKTHTCPPCPAPELLGGPSVFLFPPKPKDTLMISRTPEVTCVVVDVSHED |
| | hFc(N297A)- | | PEVKFNWYVDGVEVHNAKTKPREEQYASTYRVVSVLTVLHQDWLNGKEYK |
| | IL12RB2(24- | | CKVSNKALPAPIEKTISKAKGQPREPQVCTLPPSRDELTKNQVSLSCAVK |
| | 622) | | GFYPSDIAVEWESNGQPENNYKTTPPVLDSDGSFFLVSKLTVDKSRWQQG |
| | | | NVFSCSVMHEALHNHYTQKSLSLSPGGGGGSGGGGSKIDACKRGDVTVKP |
| | | | SHVILLGSTVNITCSLKPRQGCFHYSRRNKLILYKFDRRINFHHGHSLNS |
| | | | QVTGLPLGTTLFVCKLACINSDEIQICGAEIFVGVAPEQPQNLSCIQKGE |
| | | | QGTVACTWERGRDTHLYTEYTLQLSGPKNLTWQKQCKDIYCDYLDFGINL |
| | | | TPESPESNFTAKVTAVNSLGSSSSLPSTFTFLDIVRPLPPWDIRIKFQKA |
| | | | SVSRCTLYWRDEGLVLLNRLRYRPSNSRLWNMVNVTKAKGRHDLLDLKPF |
| | | | TEYEFQISSKLHLYKGSWSDWSESLRAQTPEEEPTGMLDVWYMKRHIDYS |
| | | | RQQISLFWKNLSVSEARGKILHYQVTLQELTGGKAMTQNITGHTSWTTVI |
| | | | PRTGNWAVAVSAANSKGSSLPTRINIMNLCEAGLLAPRQVSANSEGMDNI |
| | | | LVTWQPPRKDPSAVQEYVVEWRELHPGGDTQVPLNWLRSRPYNVSALISE |
| | | | NIKSYICYEIRVYALSGDQGGCSSILGNSKHKAPLSGPHINAITEEKGSI |
| | | | LISWNSIPVQEQMGCLLHYRIYWKERDSNSQPQLCEIPYRVSQNSHPINS |
| | | | LQPRVTYVLWMTALTAAGESSHGNEREFCLQGKAN |
| [symbol] 26 | Hole: | | DKTHTCPPCPAPELLGGPSVFLFPPKPKDTLMISRTPEVTCVVVDVSHED |
| | hFc(N297A)- | | PEVKFNWYVDGVEVHNAKTKPREEQYASTYRVVSVLTVLHQDWLNGKEYK |
| | IL12RB2(24- | | CKVSNKALPAPIEKTISKAKGQPREPQVCTLPPSRDELTKNQVSLSCAVK |
| | 319) | | GFYPSDIAVEWESNGQPENNYKTTPPVLDSDGSFFLVSKLTVDKSRWQQG |
| | | | NVFSCSVMHEALHNHYTQKSLSLSPGGGGGSGGGGSKIDACKRGDVTVKP |
| | | | SHVILLGSTVNITCSLKPRQGCFHYSRRNKLILYKFDRRINFHHGHSLNS |
| | | | QVTGLPLGTTLFVCKLACINSDEIQICGAEIFVGVAPEQPQNLSCIQKGE |
| | | | QGTVACTWERGRDTHLYTEYTLQLSGPKNLTWQKQCKDIYCDYLDFGINL |
| | | | TPESPESNFTAKVTAVNSLGSSSSLPSTFTFLDIVRPLPPWDIRIKFQKA |
| | | | SVSRCTLYWRDEGLVLLNRLRYRPSNSRLWNMVNVTKAKGRHDLLDLKPF |
| | | | TEYEFQISSKLHLYKGSWSDWSESLRAQTPEE |
| [symbol] 39 | Hole: | | DKTHTCPPCPAPELLGGPSVFLFPPKPKDTLMISRTPEVTCVVVDVSHED |
| | hFc(N297A)- | | PEVKFNWYVDGVEVHNAKTKPREEQYASTYRVVSVLTVLHQDWLNGKEYK |
| | IL12RB2(24- | | CKVSNKALPAPIEKTISKAKGQPREPQVCTLPPSRDELTKNQVSLSCAVK |
| | 222) | | GFYPSDIAVEWESNGQPENNYKTTPPVLDSDGSFFLVSKLTVDKSRWQQG |
| | | | NVFSCSVMHEALHNHYTQKSLSLSPGGGGGSGGGGSKIDACKRGDVTVKP |
| | | | SHVILLGSTVNITCSLKPRQGCFHYSRRNKLILYKFDRRINFHHGHSLNS |
| | | | QVTGLPLGTTLFVCKLACINSDEIQICGAEIFVGVAPEQPQNLSCIQKGE |
| | | | QGTVACTWERGRDTHLYTEYTLQLSGPKNLTWQKQCKDIYCDYLDFGINL |
| | | | TPESPESNFTAKVTAVNSLGSSSSLPSTFTFLDIV |
| [symbol] 40 | Hole: | | DKTHTCPPCPAPELLGGPSVFLFPPKPKDTLMISRTPEVTCVVVDVSHED |
| | hFc(N297A)- | | PEVKFNWYVDGVEVHNAKTKPREEQYASTYRVVSVLTVLHQDWLNGKEYK |
| | IL12RB2(24- | | CKVSNKALPAPIEKTISKAKGQPREPQVCTLPPSRDELTKNQVSLSCAVK |
| | 319) | | GFYPSDIAVEWESNGQPENNYKTTPPVLDSDGSFFLVSKLTVDKSRWQQG |
| | | | NVFSCSVMHEALHNHYTQKSLSLSPGGGSGGGSGKIDACKRGDVTVKPSH |
| | | | VILLGSTVNITCSLKPRQGCFHYSRRNKLILYKFDRRINFHHGHSLNSQV |
| | | | TGLPLGTTLFVCKLACINSDEIQICGAEIFVGVAPEQPQNLSCIQKGEQG |
| | | | TVACTWERGRDTHLYTEYTLQLSGPKNLTWQKQCKDIYCDYLDFGINLTP |
| | | | ESPESNFTAKVTAVNSLGSSSSLPSTFTFLDIVRPLPPWDIRIKFQKASV |
| | | | SRCTLYWRDEGLVLLNRLRYRPSNSRLWNMVNVTKAKGRHDLLDLKPFTE |
| | | | YEFQISSKLHLYKGSWSDWSESLRAQTPEE |
| [symbol] 41 | Hole: | | DKTHTCPPCPAPELLGGPSVFLFPPKPKDTLMISRTPEVTCVVVDVSHED |
| | hFc(N297A)- | | PEVKFNWYVDGVEVHNAKTKPREEQYASTYRVVSVLTVLHQDWLNGKEYK |
| | IL12RB2(24- | | CKVSNKALPAPIEKTISKAKGQPREPQVCTLPPSRDELTKNQVSLSCAVK |
| | 319) | | GFYPSDIAVEWESNGQPENNYKTTPPVLDSDGSFFLVSKLTVDKSRWQQG |
| | | | NVFSCSVMHEALHNHYTQKSLSLSPGGGGGSKIDACKRGDVTVKPSHVIL |
| | | | LGSTVNITCSLKPRQGCFHYSRRNKLILYKFDRRINFHHGHSLNSQVTGL |
| | | | PLGTTLFVCKLACINSDEIQICGAEIFVGVAPEQPQNLSCIQKGEQGTVA |
| | | | CTWERGRDTHLYTEYTLQLSGPKNLTWQKQCKDIYCDYLDFGINLTPESP |
| | | | ESNFTAKVTAVNSLGSSSSLPSTFTFLDIVRPLPPWDIRIKFQKASVSRC |
| | | | TLYWRDEGLVLLNRLRYRPSNSRLWNMVNVTKAKGRHDLLDLKPFTEYEF |
| | | | QISSKLHLYKGSWSDWSESLRAQTPEE |
| [symbol] 29 | Hole: | | DKTHTCPPCPAPELLGGPSVFLFPPKPKDTLIVIISRTPEVTCVVVDVSH |
| | hFc(N297A)- | | EDPEVKFNWYVDGVEVHNAKTKPREEQYASTYRVVSVLTVLHQDWLNGKE |
| | IL12RB2(24- | | YKCKVSNKALPAPIEKTISKAKGQPREPQVCTLPPSRDELTKNQVSLSCA |
| | 212) | | VKGFYPSDIAVEWESNGQPENNYKTTPPVLDSDGSFFLVSKLTVDKSRWQ |
| | | | QGNVFSCSVMHEALHNHYTQKSLSLSPGGGGGSGGGGSKIDACKRGDVTV |
| | | | KPSHVILLGSTVNITCSLKPRQGCFHYSRRNKLILYKFDRRINFHHGHSL |
| | | | NSQVTGLPLGTTLFVCKLACINSDEIQICGAEIFVGVAPEQPQNLSCIQK |
| | | | GEQGTVACTWERGRDTHLYTEYTLQLSGPKNLTWQKQCKDIYCDYLDFGI |
| | | | NLTPESPESNFTAKVTAVNSLGSSSSL |
| [symbol] 44 | Hole: | | DKTHTCPPCPAPELLGGPSVFLFPPKPKDTLMISRTPEVTCVVVDVSHED |
| | hFc(N297A)- | | PEVKFNWYVDGVEVHNAKTKPREEQYASTYRVVSLTVLHQDWLNGKEYKC |
| | IL12RB2(24- | | KVSNKALPAPIEKTISKAKGQPREPQVCTLPPSRDELTKNQVSLSCAVKG |
| | 222) | | FYPSDIAVEWESNGQPENNYKTTPPVLDSDGSFFLVSKLTVDKSRWQQGN |
| | | | VFSCSVMHEALHNHYTQKSLSLSPGGGGGSGGGGSKIDACKRGDVTVKPS |
| | | | HVILLGSTVNITCSLKPRQGCFHYSRRNKLILYKFDRRINFHHGHSLNSQ |
| | | | VTGLPLGTTLFVCKLACINSDEIQICGAEIFVGVAPEQPQNLSCIQKGEQ |
| | | | GTVACTWERGRDTHLYTEYTLQLSGPKNLTWQKQCKDIYCDYLDFGINLT |
| | | | PESPESNFTAKVTAVNSLGSSSSLPSTFTFLDIVRPLPP |
| [symbol] 27 | Hole: | | DKTHTCPPCPAPELLGGPSVFLFPPKPKDTLMISRTPEVTCVVVDVSHED |
| | hFc(N297A)- | | PEVKFNWYVDGVEVHNAKTKPREEQYASTYRVVSVLTVLHQDWLNGKEYK |
| | IL12RB2(24- | | CKVSNKALPAPIEKTISKAKGQPREPQVCTLPPSRDELTKNQVSLSCAVK |
| | 210) | | GFYPSDIAVEWESNGQPENNYKTTPPVLDSDGSFFLVSKLTVDKSRWQQG |
| | | | NVFSCSVMHEALHNHYTQKSLSLSPGGGGGSGGGGSKIDACKRGDVTVKP |
| | | | SHVILLGSTVNTCSLKPRQGCFHYSRRNKLILYKFDRRINFHHGHSLNSQ |
| | | | VTGLPLGTTLFVCKLACINSDEIQICGAEIFVGVAPEQPQNLSCIQKGEQ |
| | | | GTVACTWERGRDTHLYTEYTLQLSGPKNLTWQKQCKDIYCDYLDFGINLT |
| | | | PESPESNFTAKVTAVNSLGSSS |
| [symbol] 28 | Hole: | | DKTHTCPPCPAPELLGGPSVFLFPPKPKDTLMISRTPEVTCVVVDVSHED |
| | hFc(N297A)- | | PEVKFNWYVDGVEVHNAKTKPREEQYASTYRVVSVLTVLHQDWLNGKEYK |
| | IL12RB2(24- | | CKVSNKALPAPIEKTISKAKGQPREPQVCTLPPSRDELTKNQVSLSCAVK |
| | 211) | | GFYPSDIAVEWESNGQPENNYKTTPPVLDSDGSFFLVSKLTVDKSRWQQG |
| | | | NVFSCSVMHEALHNHYTQKSLSLSPGGGGGSGGGGSKIDACKRGDVTVKP |
| | | | SHVILLGSTVNITCSLKPRQGCFHYSRRNKLILYKFDRRINFHHGHSLNS |
| | | | QVTGLPLGTTLFVCKLACINSDEIQICGAEIFVGVAPEQPQNLSCIQKGE |
| | | | QGTVACTWERGRDTHLYTEYTLQLSGPKNLTWQKQCKDIYCDYLDFGINL |
| | | | TPESPESNFTAKVTAVNSLGSS |
| [symbol] 29 | Hole: | | DKTHTCPPCPAPELLGGPSVFLFPPKPKDTLMISRTPEVTCVVVDVSHED |
| | hFc(N297A)- | | PEVKFNWYVDGVEVHNAKTKPREEQYASTYRVVSVLTVLHQDWLNGKEYK |
| | IL12RB2(24- | | CKVSNKALPAPIEKTISKAKGQPREPQVCTLPPSRDELTKNQVSLSCAVK |
| | 212) | | GFYPSDIAVEWESNGQPENNYKTTPPVLDSDGSFFLVSKLTVDKSRWQQG |
| | | | NVFSCSVMHEALHNHYTQKSLSLSPGGGGGSGGGGSKIDACKRGDVTVKP |
| | | | SHVILLGSTVNITCSLKPRQGCFHYSRRNKLILYKFDRRINFHHGHSLNS |
| | | | QVTGLPLGTTLFVCKLACINSDEIQICGAEIFVGVAPEQPQNLSCIQKGE |
| | | | QGTVACTWERGRDTHLYTEYTLQLSGPKNLTWQKQCKDIYCDYLDFGINL |
| | | | TPESPESNFTAKVTAVNSLGSSSSL |
| [symbol] 30 | Hole: | | DKTHTCPPCPAPELLGGPSVFLFPPKPKDTLMISRTPEVTCVVVDVSHED |
| | hFc(N297A)- | | PEVKFNWYVDGVEVHNAKTKPREEQYASTYRVVSVLTVLHQDWLNGKEYK |
| | IL12RB2(24- | | CKVSNKALPAPIEKTISKAKGQPREPQVCTLPPSRDELTKNQVSLSCAVK |
| | 213) | | GFYPSDIAVEWESNGQPENNYKTTPPVLDSDGSFFLVSKLTVDKSRWQQG |
| | | | NVFSCSVMHEALHNHYTQKSLSLSPGGGGGSGGGGSKIDACKRGDVTVKP |
| | | | SHVILLGSTVNTCSLKPRQGCFHYSRRNKLILYKFDRRINFHHGHSLNSQ |
| | | | VTGLPLGTTLFVCKLACINSDEIQICGAEIFVGVAPEQPQNLSCIQKGEQ |
| | | | GTVACTWERGRDTHLYTEYTLQLSGPKNLTWQKQCKDIYCDYLDFGINLT |
| | | | PESPESNFTAKVTAVNSLGSSSSLP |
| [symbol] 31 | Hole: | | DKTHTCPPCPAPELLGGPSVFLFPPKPKDTLMISRTPEVTCVVVDVSHED |
| | hFc(N297A)- | | PEVKFNWYVDGVEVHNAKTKPREEQYASTYRVVSVLTVLHQDWLNGKEYK |
| | IL12RB2(24- | | CKVSNKALPAPIEKTISKAKGQPREPQVCTLPPSRDELTKNQVSLSCAVK |
| | 214) | | GFYPSDIAVEWESNGQPENNYKTTPPVLDSDGSFFLVSKLTVDKSRWQQG |
| | | | NVFSCSVMHEALHNHYTQKSLSLSPGGGGGSGGGGSKIDACKRGDVTVKP |
| | | | SHVILLGSTVNITCSLKPRQGCFHYSRRNKLILYKFDRRINFHHGHSLNS |
| | | | QVTGLPLGTTLFVCKLACINSDEIQICGAEIFVGVAPEQPQNLSCIQKGE |
| | | | QGTVACTWERGRDTHLYTEYTLQLSGPKNLTWQKQCKDIYCDYLDFGINL |
| | | | TPESPESNFTAKVTAVNSLGSSSSLPS |
| [symbol] 32 | Hole: | | DKTHTCPPCPAPELLGGPSVFLFPPKPKDTLMISRTPEVTCVVVDVSHED |
| | hFc(N297A)- | | PEVKFNWYVDGVEVHNAKTKPREEQYASTYRVVSVLTVLHQDWLNGKEYK |
| | IL12RB2(24- | | CKVSNKALPAPIEKTISKAKGQPREPQVCTLPPSRDELTKNQVSLSCAVK |
| | 215) | | GFYPSDIAVEWESNGQPENNYKTTPPVLDSDGSFFLVSKLTVDKSRWQQG |
| | | | NVFSCSVMHEALHNHYTQKSLSLSPGGGGGSGGGGSKIDACKRGDVTVKP |
| | | | SHVILLGSTVNITCSLKPRQGCFHYSRRNKLILYKFDRRINFHHGHSLNS |
| | | | QVTGLPLGTTLFVCKLACINSDEIQICGAEIFVGVAPEQPQNLSCIQKGE |
| | | | QGTVACTWERGRDTHLYTEYTLQLSGPKNLTWQKQCKDIYCDYLDFGINL |
| | | | TPESPESNFTAKVTAVNSLGSSSSLPST |
| [symbol] 33 | Hole: | | DKTHTCPPCPAPELLGGPSVFLFPPKPKDTLMISRTPEVTCVVVDVSHED |
| | hFc(N297A)- | | PEVKFNWYVDGVEVHNAKTKPREEQYASTYRVVSVLTVLHQDWLNGKEYK |
| | IL12RB2(24- | | CKVSNKALPAPIEKTISKAKGQPREPQVCTLPPSRDELTKNQVSLSCAVK |
| | 216) | | GFYPSDIAVEWESNGQPENNYKTTPPVLDSDGSFFLVSKLTVDKSRWQQG |
| | | | NVFSCSVMHEALHNHYTQKSLSLSPGGGGGSGGGGSKIDACKRGDVTVKP |
| | | | SHVILLGSTVNTCSLKPRQGCFHYSRRNKLILYKFDRRINFHHGHSLNSQ |
| | | | VTGLPLGTTLFVCKLACINSDEIQICGAEIFVGVAPEQPQNLSCIQKGEQ |
| | | | GTVACTWERGRDTHLYTEYTLQLSGPKNLTWQKQCKDIYCDYLDFGINLT |
| | | | PESPESNFTAKVTAVNSLGSSSSLPSTF |
| [symbol] 34 | Hole: | | DKTHTCPPCPAPELLGGPSVFLFPPKPKDTLMISRTPEVTCVVVDVSHED |
| | hFc(N297A)- | | PEVKFNWYVDGVEVHNAKTKPREEQYASTYRVVSVLTVLHQDWLNGKEYK |
| | IL12RB2(24- | | CKVSNKALPAPIEKTISKAKGQPREPQVCTLPPSRDELTKNQVSLSCAVK |
| | 217) | | GFYPSDIAVEWESNGQPENNYKTTPPVLDSDGSFFLVSKLTVDKSRWQQG |
| | | | NVFSCSVMHEALHNHYTQKSLSLSPGGGGGSGGGGSKIDACKRGDVTVKP |
| | | | SHVILLGSTVNITCSLKPRQGCFHYSRRNKLILYKFDRRINFHHGHSLNS |
| | | | QVTGLPLGTTLFVCKLACINSDEIQICGAEIFVGVAPEQPQNLSCIQKGE |
| | | | QGTVACTWERGRDTHLYTEYTLQLSGPKNLTWQKQCKDIYCDYLDFGINL |
| | | | TPESPESNFTAKVTAVNSLGSSSSLPSTFT |
| [symbol] 35 | Hole: | | DKTHTCPPCPAPELLGGPSVFLFPPKPKDTLMISRTPEVTCVVVDVSHED |
| | hFc(N297A)- | | PEVKFNWYVDGVEVHNAKTKPREEQYASTYRVVSVLTVLHQDWLNGKEYK |
| | IL12RB2(24- | | CKVSNKALPAPIEKTISKAKGQPREPQVCTLPPSRDELTKNQVSLSCAVK |
| | 218) | | GFYPSDIAVEWESNGQPENNYKTTPPVLDSDGSFFLVSKLTVDKSRWQQG |
| | | | NVFSCSVMHEALHNHYTQKSLSLSPGGGGGSGGGGSKIDACKRGDVTVKP |
| | | | SHVILLGSTVNITCSLKPRQGCFHYSRRNKLILYKFDRRINFHHGHSLNS |
| | | | QVTGLPLGTTLFVCKLACINSDEIQICGAEIFVGVAPEQPQNLSCIQKGE |
| | | | QGTVACTWERGRDTHLYTEYTLQLSGPKNLTWQKQCKDIYCDYLDFGINL |
| | | | TPESPESNFTAKVTAVNSLGSSSSLPSTFTF |
| [symbol] 36 | Hole: | | DKTHTCPPCPAPELLGGPSVFLFPPKPKDTLMISRTPEVTCVVVDVSHED |
| | hFc(N297A)- | | PEVKFNWYVDGVEVHNAKTKPREEQYASTYRVVSVLTVLHQDWLNGKEYK |
| | IL12RB2(24- | | CKVSNKALPAPIEKTISKAKGQPREPQVCTLPPSRDELTKNQVSLSCAVK |
| | 219) | | GFYPSDIAVEWESNGQPENNYKTTPPVLDSDGSFFLVSKLTVDKSRWQQG |
| | | | NVFSCSVMHEALHNHYTQKSLSLSPGGGGGSGGGGSKIDACKRGDVTVKP |
| | | | SHVILLGSTVNTCSLKPRQGCFHYSRRNKLILYKFDRRINFHHGHSLNSQ |
| | | | VTGLPLGTTLFVCKLACINSDEIQICGAEIFVGVAPEQPQNLSCIQKGEQ |
| | | | GTVACTWERGRDTHLYTEYTLQLSGPKNLTWQKQCKDIYCDYLDFGINLT |
| | | | PESPESNFTAKVTAVNSLGSSSSLPSTFTFL |
| [symbol] 37 | Hole: | | DKTHTCPPCPAPELLGGPSVFLFPPKPKDTLMISRTPEVTCVVVDVSHED |
| | hFc(N297A)- | | PEVKFNWYVDGVEVHNAKTKPREEQYASTYRVVSVLTVLHQDWLNGKEYK |
| | IL12RB2(24- | | CKVSNKALPAPIEKTISKAKGQPREPQVCTLPPSRDELTKNQVSLSCAVK |
| | 220) | | GFYPSDIAVEWESNGQPENNYKTTPPVLDSDGSFFLVSKLTVDKSRWQQG |
| | | | NVFSCSVMHEALHNHYTQKSLSLSPGGGGGSGGGGSKIDACKRGDVTVKP |
| | | | SHVILLGSTVNITCSLKPRQGCFHYSRRNKLILYKFDRRINFHHGHSLNS |
| | | | QVTGLPLGTTLFVCKLACINSDEIQICGAEIFVGVAPEQPQNLSCIQKGE |
| | | | QGTVACTWERGRDTHLYTEYTLQLSGPKNLTWQKQCKDIYCDYLDFGINL |
| | | | TPESPESNFTAKVTAVNSLGSSSSLPSTFTFLD |
| [symbol] 38 | Hole: | | DKTHTCPPCPAPELLGGPSVFLFPPKPKDTLMISRTPEVTCVVVDVSHED |
| | hFc(N297A)- | | PEVKFNWYVDGVEVHNAKTKPREEQYASTYRVVSVLTVLHQDWLNGKEYK |
| | IL12RB2(24- | | CKVSNKALPAPIEKTISKAKGQPREPQVCTLPPSRDELTKNQVSLSCAVK |
| | 221) | | GFYPSDIAVEWESNGQPENNYKTTPPVLDSDGSFFLVSKLTVDKSRWQQG |
| | | | NVFSCSVMHEALHNHYTQKSLSLSPGGGGGSGGGGSKIDACKRGDVTVKP |
| | | | SHVILLGSTVNITCSLKPRQGCFHYSRRNKLILYKFDRRINFHHGHSLNS |
| | | | QVTGLPLGTTLFVCKLACINSDEIQICGAEIFVGVAPEQPQNLSCIQKGE |
| | | | QGTVACTWERGRDTHLYTEYTLQLSGPKNLTWQKQCKDIYCDYLDFGINL |
| | | | TPESPESNFTAKVTAVNSLGSSSSLPSTFTFLD |
| [symbol] 39 | Hole: | | DKTHTCPPCPAPELLGGPSVFLFPPKPKDTLMISRTPEVTCVVVDVSHED |
| | hFc(N297A)- | | PEVKFNWYVDGVEVHNAKTKPREEQYASTYRVVSVLTVLHQDWLNGKEYK |
| | IL12RB2(24- | | CKVSNKALPAPIEKTISKAKGQPREPQVCTLPPSRDELTKNQVSLSCAVK |
| | 222) | | GFYPSDIAVEWESNGQPENNYKTTPPVLDSDGSFFLVSKLTVDKSRWQQG |
| | | | NVFSCSVMHEALHNHYTQKSLSLSPGGGGGSGGGGSKIDACKRGDVTVKP |
| | | | SHVILLGSTVNTCSLKPRQGCFHYSRRNKLILYKFDRRINFHHGHSLNSQ |
| | | | VTGLPLGTTLFVCKLACINSDEIQICGAEIFVGVAPEQPQNLSCIQKGEQ |
| | | | GTVACTWERGRDTHLYTEYTLQLSGPKNLTWQKQCKDIYCDYLDFGINLT |
| | | | PESPESNFTAKVTAVNSLGSSSSLPSTFTFLDIV |
| [symbol] 40 | Hole: | | DKTHTCPPCPAPELLGGPSVFLFPPKPKDTLMISRTPEVTCVVVDVSHED |
| | hFc(N297A)- | | PEVKFNWYVDGVEVHNAKTKPREEQYASTYRVVSVLTVLHQDWLNGKEYK |
| | IL12RB2(24- | | CKVSNKALPAPIEKTISKAKGQPREPQVCTLPPSRDELTKNQVSLSCAVK |
| | 223) | | GFYPSDIAVEWESNGQPENNYKTTPPVLDSDGSFFLVSKLTVDKSRWQQG |
| | | | NVFSCSVMHEALHNHYTQKSLSLSPGGGGGSGGGGSKIDACKRGDVTVKP |
| | | | SHVILLGSTVNITCSLKPRQGCFHYSRRNKLILYKFDRRINFHHGHSLNS |
| | | | QVTGLPLGTTLFVCKLACINSDEIQICGAEIFVGVAPEQPQNLSCIQKGE |
| | | | QGTVACTWERGRDTHLYTEYTLQLSGPKNLTWQKQCKDIYCDYLDFGINL |
| | | | TPESPESNFTAKVTAVNSLGSSSSLPSTFTFLDIVR |
| [symbol] 41 | Hole: | | DKTHTCPPCPAPELLGGPSVFLFPPKPKDTLMISRTPEVTCVVVDVSHED |
| | hFc(N297A)- | | PEVKFNWYVDGVEVHNAKTKPREEQYASTYRVVSVLTVLHQDWLNGKEYK |
| | IL12RB2(24- | | CKVSNKALPAPIEKTISKAKGQPREPQVCTLPPSRDELTKNQVSLSCAVK |
| | 224) | | GFYPSDIAVEWESNGQPENNYKTTPPVLDSDGSFFLVSKLTVDKSRWQQG |
| | | | NVFSCSVMHEALHNHYTQKSLSLSPGGGGGSGGGGSKIDACKRGDVTVKP |
| | | | SHVILLGSTVNITCSLKPRQGCFHYSRRNKLILYKFDRRINFHHGHSLNS |
| | | | QVTGLPLGTTLFVCKLACINSDEIQICGAEIFVGVAPEQPQNLSCIQKGE |
| | | | QGTVACTWERGRDTHLYTEYTLQLSGPKNLTWQKQCKDIYCDYLDFGINL |
| | | | TPESPESNFTAKVTAVNSLGSSSSLPSTFTFLDIVRP |
| [symbol] 42 | Hole: | | DKTHTCPPCPAPELLGGPSVFLFPPKPKDTLMISRTPEVTCVVVDVSHED |
| | hFc(N297A)- | | PEVKFNWYVDGVEVHNAKTKPREEQYASTYRVVSVLTVLHQDWLNGKEYK |
| | IL12RB2(24- | | CKVSNKALPAPIEKTISKAKGQPREPQVCTLPPSRDELTKNQVSLSCAVK |
| | 225) | | GFYPSDIAVEWESNGQPENNYKTTPPVLDSDGSFFLVSKLTVDKSRWQQG |
| | | | NVFSCSVMHEALHNHYTQKSLSLSPGGGGGSGGGGSKIDACKRGDVTVKP |
| | | | SHVILLGSTVNTCSLKPRQGCFHYSRRNKLILYKFDRRINFHHGHSLNSQ |
| | | | VTGLPLGTTLFVCKLACINSDEIQICGAEIFVGVAPEQPQNLSCIQKGEQ |
| | | | GTVACTWERGRDTHLYTEYTLQLSGPKNLTWQKQCKDIYCDYLDFGINLT |
| | | | PESPESNFTAKVTAVNSLGSSSSLPSTFTFLDIVRPL |
| [symbol] 43 | Hole: | | DKTHTCPPCPAPELLGGPSVFLFPPKPKDTLMISRTPEVTCVVVDVSHED |
| | hFc(N297A)- | | PEVKFNWYVDGVEVHNAKTKPREEQYASTYRVVSVLTVLHQDWLNGKEYK |
| | IL12RB2(24- | | CKVSNKALPAPIEKTISKAKGQPREPQVCTLPPSRDELTKNQVSLSCAVK |
| | 226) | | GFYPSDIAVEWESNGQPENNYKTTPPVLDSDGSFFLVSKLTVDKSRWQQG |
| | | | NVFSCSVMHEALHNHYTQKSLSLSPGGGGGSGGGGSKIDACKRGDVTVKP |
| | | | SHVILLGSTVNITCSLKPRQGCFHYSRRNKLILYKFDRRINFHHGHSLNS |
| | | | QVTGLPLGTTLFVCKLACINSDEIQICGAEIFVGVAPEQPQNLSCIQKGE |
| | | | QGTVACTWERGRDTHLYTEYTLQLSGPKNLTWQKQCKDIYCDYLDFGINL |
| | | | TPESPESNFTAKVTAVNSLGSSSSLPSTFTFLDIVRPLP |
| [symbol] 44 | Hole: | | DKTHTCPPCPAPELLGGPSVFLFPPKPKDTLMISRTPEVTCVVVDVSHED |
| | hFc(N297A)- | | PEVKFNWYVDGVEVHNAKTKPREEQYASTYRVVSVLTVLHQDWLNGKEYK |
| | IL12RB2(24- | | CKVSNKALPAPIEKTISKAKGQPREPQVCTLPPSRDELTKNQVSLSCAVK |
| | 227) | | GFYPSDIAVEWESNGQPENNYKTTPPVLDSDGSFFLVSKLTVDKSRWQQG |
| | | | NVFSCSVMHEALHNHYTQKSLSLSPGGGGGSGGGGSKIDACKRGDVTVKP |
| | | | SHVILLGSTVNITCSLKPRQGCFHYSRRNKLILYKFDRRINFHHGHSLNS |
| | | | QVTGLPLGTTLFVCKLACINSDEIQICGAEIFVGVAPEQPQNLSCIQKGE |
| | | | QGTVACTWERGRDTHLYTEYTLQLSGPKNLTWQKQCKDIYCDYLDFGINL |
| | | | TPESPESNFTAKVTAVNSLGSSSSLPSTFTFLDIVRPLPP |
| [symbol] 45 | Hole: | | DKTHTCPPCPAPELLGGPSVFLFPPKPKDTLMISRTPEVTCVVVDVSHED |
| | hFc(N297A)- | | PEVKFNWYVDGVEVHNAKTKPREEQYASTYRVVSVLTVLHQDWLNGKEYK |
| | IL12RB2(24- | | CKVSNKALPAPIEKTISKAKGQPREPQVCTLPPSRDELTKNQVSLSCAVK |
| | 228) | | GFYPSDIAVEWESNGQPENNYKTTPPVLDSDGSFFLVSKLTVDKSRWQQG |
| | | | NVFSCSVMHEALHNHYTQKSLSLSPGGGGGSGGGGSKIDACKRGDVTVKP |
| | | | SHVILLGSTVNTCSLKPRQGCFHYSRRNKLILYKFDRRINFHHGHSLNSQ |
| | | | VTGLPLGTTLFVCKLACINSDEIQICGAEIFVGVAPEQPQNLSCIQKGEQ |
| | | | GTVACTWERGRDTHLYTEYTLQLSGPKNLTWQKQCKDIYCDYLDFGINLT |
| | | | PESPESNFTAKVTAVNSLGSSSSLPSTFTFLDIVRPLPPW |
| [symbol] 46 | Hole: | | DKTHTCPPCPAPELLGGPSVFLFPPKPKDTLMISRTPEVTCVVVDVSHED |
| | hFc(N297A)- | | PEVKFNWYVDGVEVHNAKTKPREEQYASTYRVVSVLTVLHQDWLNGKEYK |
| | IL12RB2(24- | | CKVSNKALPAPIEKTISKAKGQPREPQVCTLPPSRDELTKNQVSLSCAVK |
| | 229) | | GFYPSDIAVEWESNGQPENNYKTTPPVLDSDGSFFLVSKLTVDKSRWQQG |
| | | | NVFSCSVMHEALHNHYTQKSLSLSPGGGGGSGGGGSKIDACKRGDVTVKP |
| | | | SHVILLGSTVNITCSLKPRQGCFHYSRRNKLILYKFDRRINFHHGHSLNS |
| | | | QVTGLPLGTTLFVCKLACINSDEIQICGAEIFVGVAPEQPQNLSCIQKGE |
| | | | QGTVACTWERGRDTHLYTEYTLQLSGPKNLTWQKQCKDIYCDYLDFGINL |
| | | | TPESPESNFTAKVTAVNSLGSSSSLPSTFTFLDIVRPLPPWD |
| [symbol] 47 | Hole: | | DKTHTCPPCPAPELLGGPSVFLFPPKPKDTLMISRTPEVTCVVVDVSHED |
| | hFc(N297A)- | | PEVKFNWYVDGVEVHNAKTKPREEQYASTYRVVSVLTVLHQDWLNGKEYK |
| | IL12RB2(24- | | CKVSNKALPAPIEKTISKAKGQPREPQVCTLPPSRDELTKNQVSLSCAVK |
| | 230) | | GFYPSDIAVEWESNGQPENNYKTTPPVLDSDGSFFLVSKLTVDKSRWQQG |
| | | | NVFSCSVMHEALHNHYTQKSLSLSPGGGGGSGGGGSKIDACKRGDVTVKP |
| | | | SHVILLGSTVNITCSLKPRQGCFHYSRRNKLILYKFDRRINFHHGHSLNS |
| | | | QVTGLPLGTTLFVCKLACINSDEIQICGAEIFVGVAPEQPQNLSCIQKGE |
| | | | QGTVACTWERGRDTHLYTEYTLQLSGPKNLTWQKQCKDIYCDYLDFGINL |
| | | | TPESPESNFTAKVTAVNSLGSSSSLPSTFTFLDIVRPLPPWDI |
| [symbol] 48 | Hole: | | DKTHTCPPCPAPELLGGPSVFLFPPKPKDTLMISRTPEVTCVVVDVSHED |
| | hFc(N297A)- | | PEVKFNWYVDGVEVHNAKTKPREEQYASTYRVVSVLTVLHQDWLNGKEYK |
| | IL12RB2(24- | | CKVSNKALPAPIEKTISKAKGQPREPQVCTLPPSRDELTKNQVSLSCAVK |
| | 231) | | GFYPSDIAVEWESNGQPENNYKTTPPVLDSDGSFFLVSKLTVDKSRWQQG |
| | | | NVFSCSVMHEALHNHYTQKSLSLSPGGGGGSGGGGSKIDACKRGDVTVKP |
| | | | SHVILLGSTVNTCSLKPRQGCFHYSRRNKLILYKFDRRINFHHGHSLNSQ |
| | | | VTGLPLGTTLFVCKLACINSDEIQICGAEIFVGVAPEQPQNLSCIQKGEQ |
| | | | GTVACTWERGRDTHLYTEYTLQLSGPKNLTWQKQCKDIYCDYLDFGINLT |
| | | | PESPESNFTAKVTAVNSLGSSSSLPSTFTFLDIVRPLPPWDIR |
| [symbol] 49 | Hole: | | DKTHTCPPCPAPELLGGPSVFLFPPKPKDTLMISRTPEVTCVVVDVSHED |
| | hFc(N297A)- | | PEVKFNWYVDGVEVHNAKTKPREEQYASTYRVVSVLTVLHQDWLNGKEYK |
| | IL12RB2(24- | | CKVSNKALPAPIEKTISKAKGQPREPQVCTLPPSRDELTKNQVSLSCAVK |
| | 232) | | GFYPSDIAVEWESNGQPENNYKTTPPVLDSDGSFFLVSKLTVDKSRWQQG |
| | | | NVFSCSVMHEALHNHYTQKSLSLSPGGGGGSGGGGSKIDACKRGDVTVKP |
| | | | SHVILLGSTVNITCSLKPRQGCFHYSRRNKLILYKFDRRINFHHGHSLNS |
| | | | QVTGLPLGTTLFVCKLACINSDEIQICGAEIFVGVAPEQPQNLSCIQKGE |
| | | | QGTVACTWERGRDTHLYTEYTLQLSGPKNLTWQKQCKDIYCDYLDFGINL |
| | | | TPESPESNFTAKVTAVNSLGSSSSLPSTFTFLDIVRPLPPWDIRI |
| [symbol] 50 | Hole: | | DKTHTCPPCPAPELLGGPSVFLFPPKPKDTLMISRTPEVTCVVVDVSHED |
| | hFc(N297A)- | | PEVKFNWYVDGVEVHNAKTKPREEQYASTYRVVSVLTVLHQDWLNGKEYK |
| | IL12RB2(24- | | CKVSNKALPAPIEKTISKAKGQPREPQVCTLPPSRDELTKNQVSLSCAVK |
| | 233) | | GFYPSDIAVEWESNGQPENNYKTTPPVLDSDGSFFLVSKLTVDKSRWQQG |
| | | | NVFSCSVMHEALHNHYTQKSLSLSPGGGGGSGGGGSKIDACKRGDVTVKP |
| | | | SHVILLGSTVNITCSLKPRQGCFHYSRRNKLILYKFDRRINFHHGHSLNS |
| | | | QVTGLPLGTTLFVCKLACINSDEIQICGAEIFVGVAPEQPQNLSCIQKGE |
| | | | QGTVACTWERGRDTHLYTEYTLQLSGPKNLTWQKQCKDIYCDYLDFGINL |
| | | | TPESPESNFTAKVTAVNSLGSSSSLPSTFTFLDIVRPLPPWDIRIK |

[symbol]

indicates data missing or illegible when filed

| [symbol] cule | Unique sequences | | Co-expression partner | |
|---|---|---|---|---|
| | DNA | Name | DNA | Name |
| | DNA627 | Hole: hFc(N297A)-IL12RB2(24-210) | DNA407 | Knob: hFc(N297A)-[VPLSLY]-hIL12B- |
| | | | | hIL12A |
| | DNA628 | Hole: hFc(N297A)-IL12RB2(24-211) | DNA407 | Knob: hFc(N297A)-[VPLSLY]-hIL12B- |
| | | | | hIL12A |
| | DNA630 | Hole: hFc(N297A)-IL12RB2(24-213) | DNA407 | Knob: hFc(N297A)-[VPLSLY]-hIL12B- |
| | | | | hIL12A |
| | DNA631 | Hole: hFc(N297A)-IL12RB2(24-214) | DNA407 | Knob: hFc(N297A)-[VPLSLY]-hIL12B- |
| | | | | hIL12A |
| | DNA632 | Hole: hFc(N297A)-IL12RB2(24-215) | DNA407 | Knob: hFc(N297A)-[VPLSLY]-hIL12B- |
| | | | | hIL12A |
| | DNA633 | Hole: hFc(N297A)-IL12RB2(24-216) | DNA407 | Knob: hFc(N297A)-[VPLSLY]-hIL12B- |
| | | | | hIL12A |
| | DNA634 | Hole: hFc(N297A)-IL12RB2(24-217) | DNA407 | Knob: hFc(N297A)-[VPLSLY]-hIL12B- |
| | | | | hIL12A |
| | DNA635 | Hole: hFc(N297A)-IL12RB2(24-218) | DNA407 | Knob: hFc(N297A)-[VPLSLY]-hIL12B- |
| | | | | hIL12A |
| | DNA636 | Hole: hFc(N297A)-IL12RB2(24-219) | DNA407 | Knob: hFc(N297A)-[VPLSLY]-hIL12B- |
| | | | | hIL12A |
| | DNA637 | Hole: hFc(N297A)-IL12RB2(24-220) | DNA407 | Knob: hFc(N297A)-[VPLSLY]-hIL12B- |
| | | | | hIL12A |
| | DNA638 | Hole: hFc(N297A)-IL12RB2(24-221) | DNA407 | Knob: hFc(N297A)-[VPLSLY]-hIL12B- |
| | | | | hIL12A |
| | DNA639 | Hole: hFc(N297A)-IL12RB2(24-222) | DNA407 | Knob: hFc(N297A)-[VPLSLY]-hIL12B- |
| | | | | hIL12A |
| | DNA640 | Hole: hFc(N297A)-IL12RB2(24-223) | DNA407 | Knob: hFc(N297A)-[VPLSLY]-hIL12B- |
| | | | | hIL12A |
| | DNA641 | Hole: hFc(N297A)-IL12RB2(24-224) | DNA407 | Knob: hFc(N297A)-[VPLSLY]-hIL12B- |
| | | | | hIL12A |
| | DNA642 | Hole: hFc(N297A)-IL12RB2(24-225) | DNA407 | Knob: hFc(N297A)-[VPLSLY]-hIL12B- |
| | | | | hIL12A |
| | DNA643 | Hole: hFc(N297A)-IL12RB2(24-226) | DNA407 | Knob: hFc(N297A)-[VPLSLY]-hIL12B- |
| | | | | hIL12A |
| | DNA645 | Hole: hFc(N297A)-IL12RB2(24-228) | DNA407 | Knob: hFc(N297A)-[VPLSLY]-hIL12B- |
| | | | | hIL12A |
| | DNA646 | Hole: hFc(N297A)-IL12RB2(24-229) | DNA407 | Knob: hFc(N297A)-[VPLSLY]-hIL12B- |
| | | | | hIL12A |
| | DNA647 | Hole: hFc(N297A)-IL12RB2(24-230) | DNA407 | Knob: hFc(N297A)-[VPLSLY]-hIL12B- |
| | | | | hIL12A |
| | DNA648 | Hole: hFc(N297A)-IL12RB2(24-231) | DNA407 | Knob: hFc(N297A)-[VPLSLY]-hIL12B- |
| | | | | hIL12A |
| | DNA649 | Hole: hFc(N297A)-IL12RB2(24-232) | DNA407 | Knob: hFc(N297A)-[VPLSLY]-hIL12B- |
| | | | | hIL12A |
| | DNA650 | Hole: hFc(N297A)-IL12RB2(24-233) | DNA407 | Knob: hFc(N297A)-[VPLSLY]-hIL12B- |
| | | | | HIL12A |

[symbol]

indicates data missing or illegible when filed

The application's sequence listing, which the Patent Office published only in electronic form, follows.

SEQUENCE LISTING (211 sequences)

SEQ ID NO: 1 - protein, 306 aa, Artificial Sequence
  Cytokine
IWELKKDVYVVELDWYPDAPGEMVVLTCDTPEEDGITWTLDQSSEVLGSGKTLTIQVKEFGDAGQYTCHKGGEVLSHSLLLLHKKEDGIWSTDILKDQKEPKNKTFLRCEAKNYSGRFTCWWLTTISTDLTFSVKSSRGSSDPQGVTCGAATLSAERVRGDNKEYEYSVECQEDSACPAAEESLPIEVMVDAVHKLKYENYTSSFFIRDIIKPDPPKNLQLKPLKNSRQVEVSWEYPDTWSTPHSYFSLTFCVQVQGKSKREKKDRVFTDKTSATVICRKNASISVRAQDRYYSSSWSEWASVPCS

SEQ ID NO: 2 - protein, 197 aa, Artificial Sequence
  Cytokine
RNLPVATPDPGMFPCLHHSQNLLRAVSNMLQKARQTLEFYPCTSEEIDHEDITKDKTSTVEACLPLELTKNESCLNSRETSFITNGSCLASRKTSFMMALCLSSIYEDLKMYQVEFKTMNAKLLMDPKRQIFLDQNMLAVIDELMQALNFNSETVPQKSSLEEPDFYKTKIKLCILLHAFRIRAVTIDRVMSYLNAS

SEQ ID NO: 3 - protein, 15 aa, Artificial Sequence
  Linker
GGGGSGGGGSGGGGS

SEQ ID NO: 4 - protein, 518 aa, Artificial Sequence
  Cytokine
IWELKKDVYVVELDWYPDAPGEMVVLTCDTPEEDGITWTLDQSSEVLGSGKTLTIQVKEFGDAGQYTCHKGGEVLSHSLLLLHKKEDGIWSTDILKDQKEPKNKTFLRCEAKNYSGRFTCWWLTTISTDLTFSVKSSRGSSDPQGVTCGAATLSAERVRGDNKEYEYSVECQEDSACPAAEESLPIEVMVDAVHKLKYENYTSSFFIRDIIKPDPPKNLQLKPLKNSRQVEVSWEYPDTWSTPHSYFSLTFCVQVQGKSKREKKDRVFTDKTSATVICRKNASISVRAQDRYYSSSWSEWASVPCSGGGGSGGGGSGGGGSRNLPVATPDPGMFPCLHHSQNLLRAVSNMLQKARQTLEFYPCTSEEIDHEDITKDKTSTVEACLPLELTKNESCLNSRETSFITNGSCLASRKTSFMMALCLSSIYEDLKMYQVEFKTMNAKLLMDPKRQIFLDQNMLAVIDELMQALNFNSETVPQKSSLEEPDFYKTKIKLCILLHAFRIRAVTIDRVMSYLNAS

SEQ ID NO: 5 - protein, 213 aa, Artificial Sequence
  Masking moiety
CRTSECCFQDPPYPDADSGSASGPRDLRCYRISSDRYECSWQYEGPTAGVSHFLRCCLSSGRCCYFAAGSATRLQFSDQAGVSVLYTVTLWVESWARNQTEKSPEVTLQLYNSVKYEPPLGDIKVSKLAGQLRMEWETPDNQVGAEVQFRHRTPSSPWKLGDCGPQDDDTESCLCPLEMNVAQEFQLRRRQLGSQGSSWSKWSSPVCVPPENP

SEQ ID NO: 6 - protein, 522 aa, Artificial Sequence
  Masking moiety
CRTSECCFQDPPYPDADSGSASGPRDLRCYRISSDRYECSWQYEGPTAGVSHFLRCCLSSGRCCYFAAGSATRLQFSDQAGVSVLYTVTLWVESWARNQTEKSPEVTLQLYNSVKYEPPLGDIKVSKLAGQLRMEWETPDNQVGAEVQFRHRTPSSPWKLGDCGPQDDDTESCLCPLEMNVAQEFQLRRRQLGSQGSSWSKWSSPVCVPPENPPQPQVRFSVEQLGQDGRRRLTLKEQPTQLELPEGCQGLAPGTEVTYRLQLHMLSCPCKAKATRTLHLGKMPYLSGAAYNVAVISSNQFGPGLNQTWHIPADTHTEPVALNISVGTNGTTMYWPARAQSMTYCIEWQPVGQDGGLATCSLTAPQDPDPAGMATYSWSRESGAMGQEKCYYITIFASAHPEKLTLWSTVLSTYHFGGNASAAGTPHHVSVKNHSLDSVSVDWAPSLLSTCPGVLKEYVVRCRDEDSKQVSEHPVQPTETQVTLSGLRAGVAYTVQVRADTAWLRGVWSQPQRFSIEVQVSD

SEQ ID NO: 7 - protein, 189 aa, Artificial Sequence
  Masking moiety
KIDACKRGDVTVKPSHVILLGSTVNITCSLKPRQGCFHYSRRNKLILYKFDRRINFHHGHSLNSQVTGLPLGTTLFVCKLACINSDEIQICGAEIFVGVAPEQPQNLSCIQKGEQGTVACTWERGRDTHLYTEYTLQLSGPKNLTWQKQCKDIYCDYLDFGINLTPESPESNFTAKVTAVNSLGSSSSL

SEQ ID NO: 8 - protein, 199 aa, Artificial Sequence
  Masking moiety
KIDACKRGDVTVKPSHVILLGSTVNITCSLKPRQGCFHYSRRNKLILYKFDRRINFHHGHSLNSQVTGLPLGTTLFVCKLACINSDEIQICGAEIFVGVAPEQPQNLSCIQKGEQGTVACTWERGRDTHLYTEYTLQLSGPKNLTWQKQCKDIYCDYLDFGINLTPESPESNFTAKVTAVNSLGSSSSLPSTFTFLDIV

SEQ ID NO: 9 - protein, 296 aa, Artificial Sequence
  Masking moiety
KIDACKRGDVTVKPSHVILLGSTVNITCSLKPRQGCFHYSRRNKLILYKFDRRINFHHGHSLNSQVTGLPLGTTLFVCKLACINSDEIQICGAEIFVGVAPEQPQNLSCIQKGEQGTVACTWERGRDTHLYTEYTLQLSGPKNLTWQKQCKDIYCDYLDFGINLTPESPESNFTAKVTAVNSLGSSSSLPSTFTFLDIVRPLPPWDIRIKFQKASVSRCTLYWRDEGLVLLNRLRYRPSNSRLWNMVNVTKAKGRHDLLDLKPFTEYEFQISSKLHLYKGSWSDWSESLRAQTPEE

SEQ ID NO: 10 - protein, 599 aa, Artificial Sequence
  Masking moiety
KIDACKRGDVTVKPSHVILLGSTVNITCSLKPRQGCFHYSRRNKLILYKFDRRINFHHGHSLNSQVTGLPLGTTLFVCKLACINSDEIQICGAEIFVGVAPEQPQNLSCIQKGEQGTVACTWERGRDTHLYTEYTLQLSGPKNLTWQKQCKDIYCDYLDFGINLTPESPESNFTAKVTAVNSLGSSSSLPSTFTFLDIVRPLPPWDIRIKFQKASVSRCTLYWRDEGLVLLNRLRYRPSNSRLWNMVNVTKAKGRHDLLDLKPFTEYEFQISSKLHLYKGSWSDWSESLRAQTPEEEPTGMLDVWYMKRHIDYSRQQISLFWKNLSVSEARGKILHYQVTLQELTGGKAMTQNITGHTSWTTVIPRTGNWAVAVSAANSKGSSLPTRINIMNLCEAGLLAPRQVSANSEGMDNILVTWQPPRKDPSAVQEYVVEWRELHPGGDTQVPLNWLRSRPYNVSALISENIKSYICYEIRVYALSGDQGGCSSILGNSKHKAPLSGPHINAITEEKGSILISWNSIPVQEQMGCLLHYRIYWKERDSNSQPQLCEIPYRVSQNSHPINSLQPRVTYVLWMTALTAAGESSHGNEREFCLQGKAN

SEQ ID NO: 11 - protein, 204 aa, Artificial Sequence
  Masking moiety
KIDACKRGDVTVKPSHVILLGSTVNITCSLKPRQGCFHYSRRNKLILYKFDRRINFHHGHSLNSQVTGLPLGTTLFVCKLACINSDEIQICGAEIFVGVAPEQPQNLSCIQKGEQGTVACTWERGRDTHLYTEYTLQLSGPKNLTWQKQCKDIYCDYLDFGINLTPESPESNFTAKVTAVNSLGSSSSLPSTFTFLDIVRPLPP

SEQ ID NO: 12 - protein, 5 aa, Artificial Sequence
  Linker
GGGGS

SEQ ID NO: 13 - protein, 10 aa, Artificial Sequence
  Linker
GGGGSGGGGS

SEQ ID NO: 14 - protein, 8 aa, Artificial Sequence
  Linker
GGSGGGSG

SEQ ID NO: 15 - protein, 6 aa, Artificial Sequence
  Cleavable peptide
VPLSLY

SEQ ID NO: 16 - protein, 6 aa, Artificial Sequence
  Linker
GGSGGS

SEQ ID NO: 17 - protein, 9 aa, Artificial Sequence
  Linker
GGSGGSGGS

SEQ ID NO: 18 - skipped

SEQ ID NO: 19 - protein, 15 aa, Artificial Sequence
  Linker
GGSGGSVPLSLYSGP

SEQ ID NO: 20 - protein, 18 aa, Artificial Sequence
  Linker
GGSGGSGGSVPLSLYSGP

SEQ ID NO: 21 - protein, 330 aa, Artificial Sequence [sequence omitted]

SEQ ID NO: 22 - protein, 226 aa, Artificial Sequence
  Fc
DKTHTCPPCPAPELLGGPSVFLFPPKPKDTLMISRTPEVTCVVVDVSHEDPEVKFNWYVDGVEVHNAKTKPREEQYNSTYRVVSVLTVLHQDWLNGKEYKCKVSNKALPAPIEKTISKAKGQPREPQVYTLPPSRDELTKNQVSLTCLVKGFYPSDIAVEWESNGQPENNYKTTPPVLDSDGSFFLYSKLTVDKSRWQQGNVFSCSVMHEALHNHYTQKSLSLSPG

SEQ ID NO: 23 - protein, 226 aa, Artificial Sequence
  Fc
DKTHTCPPCPAPELLGGPSVFLFPPKPKDTLMISRTPEVTCVVVDVSHEDPEVKFNWYVDGVEVHNAKTKPREEQYNSTYRVVSVLTVLHQDWLNGKEYKCKVSNKALPAPIEKTISKAKGQPREPQVCTLPPSRDELTKNQVSLSCAVKGFYPSDIAVEWESNGQPENNYKTTPPVLDSDGSFFLVSKLTVDKSRWQQGNVFSCSVMHEALHNHYTQKSLSLSPG

SEQ ID NO: 24 - protein, 226 aa, Artificial Sequence
  Fc
DKTHTCPPCPAPELLGGPSVFLFPPKPKDTLMISRTPEVTCVVVDVSHEDPEVKFNWYVDGVEVHNAKTKPREEQYNSTYRVVSVLTVLHQDWLNGKEYKCKVSNKALPAPIEKTISKAKGQPREPQVYTLPPCRDELTKNQVSLWCLVKGFYPSDIAVEWESNGQPENNYKTTPPVLDSDGSFFLYSKLTVDKSRWQQGNVFSCSVMHEALHNHYTQKSLSLSPG

SEQ ID NO: 25 - protein, 226 aa, Artificial Sequence
  Fc
DKTHTCPPCPAPELLGGPSVFLFPPKPKDTLMISRTPEVTCVVVDVSHEDPEVKFNWYVDGVEVHNAKTKPREEQYASTYRVVSVLTVLHQDWLNGKEYKCKVSNKALPAPIEKTISKAKGQPREPQVCTLPPSRDELTKNQVSLSCAVKGFYPSDIAVEWESNGQPENNYKTTPPVLDSDGSFFLVSKLTVDKSRWQQGNVFSCSVMHEALHNHYTQKSLSLSPG

SEQ ID NO: 26 - protein, 226 aa, Artificial Sequence
  Fc
DKTHTCPPCPAPELLGGPSVFLFPPKPKDTLMISRTPEVTCVVVDVSHEDPEVKFNWYVDGVEVHNAKTKPREEQYASTYRVVSVLTVLHQDWLNGKEYKCKVSNKALPAPIEKTISKAKGQPREPQVYTLPPCRDELTKNQVSLWCLVKGFYPSDIAVEWESNGQPENNYKTTPPVLDSDGSFFLYSKLTVDKSRWQQGNVFSCSVMHEALHNHYTQKSLSLSPG

SEQ ID NO: 27 - protein, 226 aa, Artificial Sequence
  Fc
DKTHTCPPCPAPELLGGPSVFLFPPKPKDTLMASRTPEVTCVVVDVSHEDPEVKFNWYVDGVEVHNAKTKPREEQYASTYRVVSVLTVLHQDWLNGKEYKCKVSNKALPAPIEKTISKAKGQPREPQVCTLPPSRDELTKNQVSLSCAVKGFYPSDIAVEWESNGQPENNYKTTPPVLDSDGSFFLVSKLTVDKSRWQQGNVFSCSVMHEALHNHYTQKSLSLSPG

SEQ ID NO: 28 - protein, 226 aa, Artificial Sequence
  Fc
DKTHTCPPCPAPELLGGPSVFLFPPKPKDTLMASRTPEVTCVVVDVSHEDPEVKFNWYVDGVEVHNAKTKPREEQYASTYRVVSVLTVLHQDWLNGKEYKCKVSNKALPAPIEKTISKAKGQPREPQVYTLPPCRDELTKNQVSLWCLVKGFYPSDIAVEWESNGQPENNYKTTPPVLDSDGSFFLYSKLTVDKSRWQQGNVFSCSVMHEALHNHYTQKSLSLSPG

SEQ ID NO: 29 - protein, 523 aa, Artificial Sequence
  Cleavage product
LYSGPIWELKKDVYVVELDWYPDAPGEMVVLTCDTPEEDGITWTLDQSSEVLGSGKTLTIQVKEFGDAGQYTCHKGGEVLSHSLLLLHKKEDGIWSTDILKDQKEPKNKTFLRCEAKNYSGRFTCWWLTTISTDLTFSVKSSRGSSDPQGVTCGAATLSAERVRGDNKEYEYSVECQEDSACPAAEESLPIEVMVDAVHKLKYENYTSSFFIRDIIKPDPPKNLQLKPLKNSRQVEVSWEYPDTWSTPHSYFSLTFCVQVQGKSKREKKDRVFTDKTSATVICRKNASISVRAQDRYYSSSWSEWASVPCSGGGGSGGGGSGGGGSRNLPVATPDPGMFPCLHHSQNLLRAVSNMLQKARQTLEFYPCTSEEIDHEDITKDKTSTVEACLPLELTKNESCLNSRETSFITNGSCLASRKTSFMMALCLSSIYEDLKMYQVEFKTMNAKLLMDPKRQIFLDQNMLAVIDELMQALNFNSETVPQKSSLEEPDFYKTKIKLCILLHAFRIRAVTIDRVMSYLNAS

SEQ ID NO: 30 - protein, 449 aa, Artificial Sequence
  Polypeptide chain
DKTHTCPPCPAPELLGGPSVFLFPPKPKDTLMISRTPEVTCVVVDVSHEDPEVKFNWYVDGVEVHNAKTKPREEQYASTYRVVSVLTVLHQDWLNGKEYKCKVSNKALPAPIEKTISKAKGQPREPQVCTLPPSRDELTKNQVSLSCAVKGFYPSDIAVEWESNGQPENNYKTTPPVLDSDGSFFLVSKLTVDKSRWQQGNVFSCSVMHEALHNHYTQKSLSLSPGGGGGSGGGGSCRTSECCFQDPPYPDADSGSASGPRDLRCYRISSDRYECSWQYEGPTAGVSHFLRCCLSSGRCCYFAAGSATRLQFSDQAGVSVLYTVTLWVESWARNQTEKSPEVTLQLYNSVKYEPPLGDIKVSKLAGQLRMEWETPDNQVGAEVQFRHRTPSSPWKLGDCGPQDDDTESCLCPLEMNVAQEFQLRRRQLGSQGSSWSKWSSPVCVPPENP

SEQ ID NO: 31 - protein, 758 aa, Artificial Sequence
  Polypeptide chain
DKTHTCPPCPAPELLGGPSVFLFPPKPKDTLMISRTPEVTCVVVDVSHEDPEVKFNWYVDGVEVHNAKTKPREEQYASTYRVVSVLTVLHQDWLNGKEYKCKVSNKALPAPIEKTISKAKGQPREPQVCTLPPSRDELTKNQVSLSCAVKGFYPSDIAVEWESNGQPENNYKTTPPVLDSDGSFFLVSKLTVDKSRWQQGNVFSCSVMHEALHNHYTQKSLSLSPGGGGGSGGGGSCRTSECCFQDPPYPDADSGSASGPRDLRCYRISSDRYECSWQYEGPTAGVSHFLRCCLSSGRCCYFAAGSATRLQFSDQAGVSVLYTVTLWVESWARNQTEKSPEVTLQLYNSVKYEPPLGDIKVSKLAGQLRMEWETPDNQVGAEVQFRHRTPSSPWKLGDCGPQDDDTESCLCPLEMNVAQEFQLRRRQLGSQGSSWSKWSSPVCVPPENPPQPQVRFSVEQLGQDGRRRLTLKEQPTQLELPEGCQGLAPGTEVTYRLQLHMLSCPCKAKATRTLHLGKMPYLSGAAYNVAVISSNQFGPGLNQTWHIPADTHTEPVALNISVGTNGTTMYWPARAQSMTYCIEWQPVGQDGGLATCSLTAPQDPDPAGMATYSWSRESGAMGQEKCYYITIFASAHPEKLTLWSTVLSTYHFGGNASAAGTPHHVSVKNHSLDSVSVDWAPSLLSTCPGVLKEYVVRCRDEDSKQVSEHPVQPTETQVTLSGLRAGVAYTVQVRADTAWLRGVWSQPQRFSIEVQVSD

SEQ ID NO: 32 - protein, 425 aa, Artificial Sequence
  Polypeptide chain
DKTHTCPPCPAPELLGGPSVFLFPPKPKDTLMISRTPEVTCVVVDVSHEDPEVKFNWYVDGVEVHNAKTKPREEQYASTYRVVSVLTVLHQDWLNGKEYKCKVSNKALPAPIEKTISKAKGQPREPQVCTLPPSRDELTKNQVSLSCAVKGFYPSDIAVEWESNGQPENNYKTTPPVLDSDGSFFLVSKLTVDKSRWQQGNVFSCSVMHEALHNHYTQKSLSLSPGGGGGSGGGGSKIDACKRGDVTVKPSHVILLGSTVNITCSLKPRQGCFHYSRRNKLILYKFDRRINFHHGHSLNSQVTGLPLGTTLFVCKLACINSDEIQICGAEIFVGVAPEQPQNLSCIQKGEQGTVACTWERGRDTHLYTEYTLQLSGPKNLTWQKQCKDIYCDYLDFGINLTPESPESNFTAKVTAVNSLGSSSSL

SEQ ID NO: 33 - protein, 435 aa, Artificial Sequence
  Polypeptide chain
DKTHTCPPCPAPELLGGPSVFLFPPKPKDTLMISRTPEVTCVVVDVSHEDPEVKFNWYVDGVEVHNAKTKPREEQYASTYRVVSVLTVLHQDWLNGKEYKCKVSNKALPAPIEKTISKAKGQPREPQVCTLPPSRDELTKNQVSLSCAVKGFYPSDIAVEWESNGQPENNYKTTPPVLDSDGSFFLVSKLTVDKSRWQQGNVFSCSVMHEALHNHYTQKSLSLSPGGGGGSGGGGSKIDACKRGDVTVKPSHVILLGSTVNITCSLKPRQGCFHYSRRNKLILYKFDRRINFHHGHSLNSQVTGLPLGTTLFVCKLACINSDEIQICGAEIFVGVAPEQPQNLSCIQKGEQGTVACTWERGRDTHLYTEYTLQLSGPKNLTWQKQCKDIYCDYLDFGINLTPESPESNFTAKVTAVNSLGSSSSLPSTFTFLDIV

SEQ ID NO: 34 - protein, 532 aa, Artificial Sequence
  Polypeptide chain
DKTHTCPPCPAPELLGGPSVFLFPPKPKDTLMISRTPEVTCVVVDVSHEDPEVKFNWYVDGVEVHNAKTKPREEQYASTYRVVSVLTVLHQDWLNGKEYKCKVSNKALPAPIEKTISKAKGQPREPQVCTLPPSRDELTKNQVSLSCAVKGFYPSDIAVEWESNGQPENNYKTTPPVLDSDGSFFLVSKLTVDKSRWQQGNVFSCSVMHEALHNHYTQKSLSLSPGGGGGSGGGGSKIDACKRGDVTVKPSHVILLGSTVNITCSLKPRQGCFHYSRRNKLILYKFDRRINFHHGHSLNSQVTGLPLGTTLFVCKLACINSDEIQICGAEIFVGVAPEQPQNLSCIQKGEQGTVACTWERGRDTHLYTEYTLQLSGPKNLTWQKQCKDIYCDYLDFGINLTPESPESNFTAKVTAVNSLGSSSSLPSTFTFLDIVRPLPPWDIRIKFQKASVSRCTLYWRDEGLVLLNRLRYRPSNSRLWNMVNVTKAKGRHDLLDLKPFTEYEFQISSKLHLYKGSWSDWSESLRAQTPEE

SEQ ID NO: 35 - protein, 527 aa, Artificial Sequence
  Polypeptide chain
DKTHTCPPCPAPELLGGPSVFLFPPKPKDTLMISRTPEVTCVVVDVSHEDPEVKFNWYVDGVEVHNAKTKPREEQYASTYRVVSVLTVLHQDWLNGKEYKCKVSNKALPAPIEKTISKAKGQPREPQVCTLPPSRDELTKNQVSLSCAVKGFYPSDIAVEWESNGQPENNYKTTPPVLDSDGSFFLVSKLTVDKSRWQQGNVFSCSVMHEALHNHYTQKSLSLSPGGGGGSKIDACKRGDVTVKPSHVILLGSTVNITCSLKPRQGCFHYSRRNKLILYKFDRRINFHHGHSLNSQVTGLPLGTTLFVCKLACINSDEIQICGAEIFVGVAPEQPQNLSCIQKGEQGTVACTWERGRDTHLYTEYTLQLSGPKNLTWQKQCKDIYCDYLDFGINLTPESPESNFTAKVTAVNSLGSSSSLPSTFTFLDIVRPLPPWDIRIKFQKASVSRCTLYWRDEGLVLLNRLRYRPSNSRLWNMVNVTKAKGRHDLLDLKPFTEYEFQISSKLHLYKGSWSDWSESLRAQTPEE

SEQ ID NO: 36 - protein, 530 aa, Artificial Sequence
  Polypeptide chain
DKTHTCPPCPAPELLGGPSVFLFPPKPKDTLMISRTPEVTCVVVDVSHEDPEVKFNWYVDGVEVHNAKTKPREEQYASTYRVVSVLTVLHQDWLNGKEYKCKVSNKALPAPIEKTISKAKGQPREPQVCTLPPSRDELTKNQVSLSCAVKGFYPSDIAVEWESNGQPENNYKTTPPVLDSDGSFFLVSKLTVDKSRWQQGNVFSCSVMHEALHNHYTQKSLSLSPGGGSGGGSGKIDACKRGDVTVKPSHVILLGSTVNITCSLKPRQGCFHYSRRNKLILYKFDRRINFHHGHSLNSQVTGLPLGTTLFVCKLACINSDEIQICGAEIFVGVAPEQPQNLSCIQKGEQGTVACTWERGRDTHLYTEYTLQLSGPKNLTWQKQCKDIYCDYLDFGINLTPESPESNFTAKVTAVNSLGSSSSLPSTFTFLDIVRPLPPWDIRIKFQKASVSRCTLYWRDEGLVLLNRLRYRPSNSRLWNMVNVTKAKGRHDLLDLKPFTEYEFQISSKLHLYKGSWSDWSESLRAQTPEE

SEQ ID NO: 37 - protein, 835 aa, Artificial Sequence
  Polypeptide chain
DKTHTCPPCPAPELLGGPSVFLFPPKPKDTLMISRTPEVTCVVVDVSHEDPEVKFNWYVDGVEVHNAKTKPREEQYASTYRVVSVLTVLHQDWLNGKEYKCKVSNKALPAPIEKTISKAKGQPREPQVCTLPPSRDELTKNQVSLSCAVKGFYPSDIAVEWESNGQPENNYKTTPPVLDSDGSFFLVSKLTVDKSRWQQGNVFSCSVMHEALHNHYTQKSLSLSPGGGGGSGGGGSKIDACKRGDVTVKPSHVILLGSTVNITCSLKPRQGCFHYSRRNKLILYKFDRRINFHHGHSLNSQVTGLPLGTTLFVCKLACINSDEIQICGAEIFVGVAPEQPQNLSCIQKGEQGTVACTWERGRDTHLYTEYTLQLSGPKNLTWQKQCKDIYCDYLDFGINLTPESPESNFTAKVTAVNSLGSSSSLPSTFTFLDIVRPLPPWDIRIKFQKASVSRCTLYWRDEGLVLLNRLRYRPSNSRLWNMVNVTKAKGRHDLLDLKPFTEYEFQISSKLHLYKGSWSDWSESLRAQTPEEEPTGMLDVWYMKRHIDYSRQQISLFWKNLSVSEARGKILHYQVTLQELTGGKAMTQNITGHTSWTTVIPRTGNWAVAVSAANSKGSSLPTRINIMNLCEAGLLAPRQVSANSEGMDNILVTWQPPRKDPSAVQEYVVEWRELHPGGDTQVPLNWLRSRPYNVSALISENIKSYICYEIRVYALSGDQGGCSSILGNSKHKAPLSGPHINAITEEKGSILISWNSIPVQEQMGCLLHYRIYWKERDSNSQPQLCEIPYRVSQNSHPINSLQPRVTYVLWMTALTAAGESSHGNEREFCLQGKAN

SEQ ID NO: 38 - protein, 440 aa, Artificial Sequence
  Polypeptide chain
DKTHTCPPCPAPELLGGPSVFLFPPKPKDTLMISRTPEVTCVVVDVSHEDPEVKFNWYVDGVEVHNAKTKPREEQYASTYRVVSVLTVLHQDWLNGKEYKCKVSNKALPAPIEKTISKAKGQPREPQVCTLPPSRDELTKNQVSLSCAVKGFYPSDIAVEWESNGQPENNYKTTPPVLDSDGSFFLVSKLTVDKSRWQQGNVFSCSVMHEALHNHYTQKSLSLSPGGGGGSGGGGSKIDACKRGDVTVKPSHVILLGSTVNITCSLKPRQGCFHYSRRNKLILYKFDRRINFHHGHSLNSQVTGLPLGTTLFVCKLACINSDEIQICGAEIFVGVAPEQPQNLSCIQKGEQGTVACTWERGRDTHLYTEYTLQLSGPKNLTWQKQCKDIYCDYLDFGINLTPESPESNFTAKVTAVNSLGSSSSLPSTFTFLDIVRPLPP

SEQ ID NO: 39 - protein, 759 aa, Artificial Sequence
  Polypeptide chain
DKTHTCPPCPAPELLGGPSVFLFPPKPKDTLMISRTPEVTCVVVDVSHEDPEVKFNWYVDGVEVHNAKTKPREEQYASTYRVVSVLTVLHQDWLNGKEYKCKVSNKALPAPIEKTISKAKGQPREPQVYTLPPCRDELTKNQVSLWCLVKGFYPSDIAVEWESNGQPENNYKTTPPVLDSDGSFFLYSKLTVDKSRWQQGNVFSCSVMHEALHNHYTQKSLSLSPGGGSGGSVPLSLYSGPIWELKKDVYVVELDWYPDAPGEMVVLTCDTPEEDGITWTLDQSSEVLGSGKTLTIQVKEFGDAGQYTCHKGGEVLSHSLLLLHKKEDGIWSTDILKDQKEPKNKTFLRCEAKNYSGRFTCWWLTTISTDLTFSVKSSRGSSDPQGVTCGAATLSAERVRGDNKEYEYSVECQEDSACPAAEESLPIEVMVDAVHKLKYENYTSSFFIRDIIKPDPPKNLQLKPLKNSRQVEVSWEYPDTWSTPHSYFSLTFCVQVQGKSKREKKDRVFTDKTSATVICRKNASISVRAQDRYYSSSWSEWASVPCSGGGGSGGGGSGGGGSRNLPVATPDPGMFPCLHHSQNLLRAVSNMLQKARQTLEFYPCTSEEIDHEDITKDKTSTVEACLPLELTKNESCLNSRETSFITNGSCLASRKTSFMMALCLSSIYEDLKMYQVEFKTMNAKLLMDPKRQIFLDQNMLAVIDELMQALNFNSETVPQKSSLEEPDFYKTKIKLCILLHAFRIRAVTIDRVMSYLNAS

SEQ ID NO: 40 - protein, 762 aa, Artificial Sequence
  Polypeptide chain
DKTHTCPPCPAPELLGGPSVFLFPPKPKDTLMISRTPEVTCVVVDVSHEDPEVKFNWYVDGVEVHNAKTKPREEQYASTYRVVSVLTVLHQDWLNGKEYKCKVSNKALPAPIEKTISKAKGQPREPQVYTLPPCRDELTKNQVSLWCLVKGFYPSDIAVEWESNGQPENNYKTTPPVLDSDGSFFLYSKLTVDKSRWQQGNVFSCSVMHEALHNHYTQKSLSLSPGGGSGGSGGSVPLSLYSGPIWELKKDVYVVELDWYPDAPGEMVVLTCDTPEEDGITWTLDQSSEVLGSGKTLTIQVKEFGDAGQYTCHKGGEVLSHSLLLLHKKEDGIWSTDILKDQKEPKNKTFLRCEAKNYSGRFTCWWLTTISTDLTFSVKSSRGSSDPQGVTCGAATLSAERVRGDNKEYEYSVECQEDSACPAAEESLPIEVMVDAVHKLKYENYTSSFFIRDIIKPDPPKNLQLKPLKNSRQVEVSWEYPDTWSTPHSYFSLTFCVQVQGKSKREKKDRVFTDKTSATVICRKNASISVRAQDRYYSSSWSEWASVPCSGGGGSGGGGSGGGGSRNLPVATPDPGMFPCLHHSQNLLRAVSNMLQKARQTLEFYPCTSEEIDHEDITKDKTSTVEACLPLELTKNESCLNSRETSFITNGSCLASRKTSFMMALCLSSIYEDLKMYQVEFKTMNAKLLMDPKRQIFLDQNMLAVIDELMQALNFNSETVPQKSSLEEPDFYKTKIKLCILLHAFRIRAVTIDRVMSYLNAS

SEQ ID NO: 41 - protein, 8 aa, Artificial Sequence
  Cleavable peptide
MPYDLYHP

SEQ ID NO: 42 - protein, 8 aa, Artificial Sequence
  Cleavable peptide
DSGGFMLT

SEQ ID NO: 43 - protein, 8 aa, Artificial Sequence
  Cleavable peptide
RAAAVKSP

SEQ ID NO: 44 - protein, 10 aa, Artificial Sequence
  Cleavable peptide
ISSGLLSGRS

SEQ ID NO: 45 - protein, 9 aa, Artificial Sequence
  Cleavable peptide
DLLAVVAAS

SEQ ID NO: 46 - protein, 17 aa, Artificial Sequence
  Linker
GGSGGSMPYDLYHPSGP

SEQ ID NO: 47 - protein, 20 aa, Artificial Sequence
  Linker
GGSGGSGGSMPYDLYHPSGP

SEQ ID NO: 48 - protein, 17 aa, Artificial Sequence
  Linker
GGSGGSDSGGFMLTSGP

SEQ ID NO: 49 - protein, 20 aa, Artificial Sequence
  Linker
GGSGGSGGSDSGGFMLTSGP

SEQ ID NO: 50 - protein, 17 aa, Artificial Sequence
  Linker
GGSGGSRAAAVKSPSGP

SEQ ID NO: 51 - protein, 20 aa, Artificial Sequence
  Linker
GGSGGSGGSRAAAVKSPSGP

SEQ ID NO: 52 - protein, 19 aa, Artificial Sequence
  Linker
GGSGGSISSGLLSGRSSGP

SEQ ID NO: 53 - protein, 22 aa, Artificial Sequence
  Linker
GGSGGSGGSISSGLLSGRSSGP

SEQ ID NO: 54 - protein, 18 aa, Artificial Sequence
  Linker
GGSGGSGGSGGSGGSSGP

SEQ ID NO: 55 - protein, 6 aa, Artificial Sequence
  Linker
PGGSGP

SEQ ID NO: 56 - protein, 5 aa, Artificial Sequence
  Linker
GGSPG

SEQ ID NO: 57 - protein, 303 aa, Artificial Sequence
  Cytokine
IWELKKDVYVVELDWYPDAPGEMVVLTCDTPEEDGITWTLDQSSEVLGSGKTLTIQVKEFGDAGQYTCHKGGEVLSHSLLLLHKKEDGIWSTDILKDQKEPKNKTFLRCEAKNYSGRFTCWWLTTISTDLTFSVKSSRGSSDPQGVTCGAATLSAERVRGDNKEYEYSVECQEDSACPAAEESLPIEVMVDAVHKLKYENYTSSFFIRDIIKPDPPKNLQLKPLKNSRQVEVSWEYPDTWSTPHSYFSLTFCVQVQGKDNTERVFTDKTSATVICRKNASISVRAQDRYYSSSWSEWASVPCS

SEQ ID NO: 58 - protein, 304 aa, Artificial Sequence
  Cytokine
IWELKKDVYVVELDWYPDAPGEMVVLTCDTPEEDGITWTLDQSSEVLGSGKTLTIQVKEFGDAGQYTCHKGGEVLSHSLLLLHKKEDGIWSTDILKDQKEPKNKTFLRCEAKNYSGRFTCWWLTTISTDLTFSVKSSRGSSDPQGVTCGAATLSAERVRGDNKEYEYSVECQEDSACPAAEESLPIEVMVDAVHKLKYENYTSSFFIRDIIKPDPPKNLQLKPLKNSRQVEVSWEYPDTWSTPHSYFSLTFCVQVQGKDNTEGRVFTDKTSATVICRKNASISVRAQDRYYSSSWSEWASVPCS

SEQ ID NO: 59 - protein, 306 aa, Artificial Sequence
  Cytokine
IWELKKDVYVVELDWYPDAPGEMVVLTCDTPEEDGITWTLDQSSEVLGSGKTLTIQVKEFGDAGQYTCHKGGEVLSHSLLLLHKKEDGIWSTDILKDQKEPKNKTFLRCEAKNYSGRFTCWWLTTISTDLTFSVKSSRGSSDPQGVTCGAATLSAERVRGDNKEYEYSVECQEDSACPAAEESLPIEVMVDAVHKLKYENYTSSFFIRDIIKPDPPKNLQLKPLKNSRQVEVSWEYPDTWSTPHSYFSLTFSVQVQGKSKREKKDRVFTDKTSATVICRKNASISVRAQDRYYSSSWSEWASVPCS

SEQ ID NO: 60 - protein, 304 aa, Artificial Sequence
  Cytokine
IWELKKDVYVVELDWYPDAPGEMVVLTCDTPEEDGITWTLDQSSEVLGSGKTLTIQVKEFGDAGQYTCHKGGEVLSHSLLLLHKKEDGIWSTDILKDQKEPKNKTFLRCEAKNYSGRFTCWWLTTISTDLTFSVKSSRGSSDPQGVTCGAATLSAERVRGDNKEYEYSVECQEDSACPAAEESLPIEVMVDAVHKLKYENYTSSFFIRDIIKPDPPKNLQLKPLKNSRQVEVSWEYPDTWSTPHSYFSLTFSVQVQGKDNTEGRVFTDKTSATVICRKNASISVRAQDRYYSSSWSEWASVPCS

SEQ ID NO: 61 - protein, 515 aa, Artificial Sequence
  Cytokine
IWELKKDVYVVELDWYPDAPGEMVVLTCDTPEEDGITWTLDQSSEVLGSGKTLTIQVKEFGDAGQYTCHKGGEVLSHSLLLLHKKEDGIWSTDILKDQKEPKNKTFLRCEAKNYSGRFTCWWLTTISTDLTFSVKSSRGSSDPQGVTCGAATLSAERVRGDNKEYEYSVECQEDSACPAAEESLPIEVMVDAVHKLKYENYTSSFFIRDIIKPDPPKNLQLKPLKNSRQVEVSWEYPDTWSTPHSYFSLTFCVQVQGKDNTERVFTDKTSATVICRKNASISVRAQDRYYSSSWSEWASVPCSGGGGSGGGGSGGGGSRNLPVATPDPGMFPCLHHSQNLLRAVSNMLQKARQTLEFYPCTSEEIDHEDITKDKTSTVEACLPLELTKNESCLNSRETSFITNGSCLASRKTSFMMALCLSSIYEDLKMYQVEFKTMNAKLLMDPKRQIFLDQNMLAVIDELMQALNFNSETVPQKSSLEEPDFYKTKIKLCILLHAFRIRAVTIDRVMSYLNAS

SEQ ID NO: 62 - protein, 516 aa, Artificial Sequence
  Cytokine
IWELKKDVYVVELDWYPDAPGEMVVLTCDTPEEDGITWTLDQSSEVLGSGKTLTIQVKEFGDAGQYTCHKGGEVLSHSLLLLHKKEDGIWSTDILKDQKEPKNKTFLRCEAKNYSGRFTCWWLTTISTDLTFSVKSSRGSSDPQGVTCGAATLSAERVRGDNKEYEYSVECQEDSACPAAEESLPIEVMVDAVHKLKYENYTSSFFIRDIIKPDPPKNLQLKPLKNSRQVEVSWEYPDTWSTPHSYFSLTFCVQVQGKDNTEGRVFTDKTSATVICRKNASISVRAQDRYYSSSWSEWASVPCSGGGGSGGGGSGGGGSRNLPVATPDPGMFPCLHHSQNLLRAVSNMLQKARQTLEFYPCTSEEIDHEDITKDKTSTVEACLPLELTKNESCLNSRETSFITNGSCLASRKTSFMMALCLSSIYEDLKMYQVEFKTMNAKLLMDPKRQIFLDQNMLAVIDELMQALNFNSETVPQKSSLEEPDFYKTKIKLCILLHAFRIRAVTIDRVMSYLNAS

SEQ ID NO: 63 - protein, 518 aa, Artificial Sequence
  Cytokine
IWELKKDVYVVELDWYPDAPGEMVVLTCDTPEEDGITWTLDQSSEVLGSGKTLTIQVKEFGDAGQYTCHKGGEVLSHSLLLLHKKEDGIWSTDILKDQKEPKNKTFLRCEAKNYSGRFTCWWLTTISTDLTFSVKSSRGSSDPQGVTCGAATLSAERVRGDNKEYEYSVECQEDSACPAAEESLPIEVMVDAVHKLKYENYTSSFFIRDIIKPDPPKNLQLKPLKNSRQVEVSWEYPDTWSTPHSYFSLTFSVQVQGKSKREKKDRVFTDKTSATVICRKNASISVRAQDRYYSSSWSEWASVPCSGGGGSGGGGSGGGGSRNLPVATPDPGMFPCLHHSQNLLRAVSNMLQKARQTLEFYPCTSEEIDHEDITKDKTSTVEACLPLELTKNESCLNSRETSFITNGSCLASRKTSFMMALCLSSIYEDLKMYQVEFKTMNAKLLMDPKRQIFLDQNMLAVIDELMQALNFNSETVPQKSSLEEPDFYKTKIKLCILLHAFRIRAVTIDRVMSYLNAS

SEQ ID NO: 64 - protein, 516 aa, Artificial Sequence
  Cytokine
IWELKKDVYVVELDWYPDAPGEMVVLTCDTPEEDGITWTLDQSSEVLGSGKTLTIQVKEFGDAGQYTCHKGGEVLSHSLLLLHKKEDGIWSTDILKDQKEPKNKTFLRCEAKNYSGRFTCWWLTTISTDLTFSVKSSRGSSDPQGVTCGAATLSAERVRGDNKEYEYSVECQEDSACPAAEESLPIEVMVDAVHKLKYENYTSSFFIRDIIKPDPPKNLQLKPLKNSRQVEVSWEYPDTWSTPHSYFSLTFSVQVQGKDNTEGRVFTDKTSATVICRKNASISVRAQDRYYSSSWSEWASVPCSGGGGSGGGGSGGGGSRNLPVATPDPGMFPCLHHSQNLLRAVSNMLQKARQTLEFYPCTSEEIDHEDITKDKTSTVEACLPLELTKNESCLNSRETSFITNGSCLASRKTSFMMALCLSSIYEDLKMYQVEFKTMNAKLLMDPKRQIFLDQNMLAVIDELMQALNFNSETVPQKSSLEEPDFYKTKIKLCILLHAFRIRAVTIDRVMSYLNAS

SEQ ID NO: 65 - protein, 296 aa, Artificial Sequence
  Masking moiety
KIDACKRGDVTVKPSHVILLGSTVNITCSLKPRQGCFHYSRRNKLILYKFDRRINFHHGHSLNSQVTGLPLGTTLFVCKLACINSDEIQICGAEIFVGVAPEQPQNLSCIQKGEQGTVACTWERGRDTHLYTEYTLQLSGPKNLTWQKQCKDIYCDYLDFGINLTPESPESNFTAKVTAVNSLGSSSSLPSTFTFLDIVRPLPPWDIRIKFQKASVSRSTLYWRDEGLVLLNRLRYRPSNSRLWNMVNVTKAKGRHDLLDLKPFTEYEFQISSKLHLYKGSWSDWSESLRAQTPEE

SEQ ID NO: 66 - protein, 523 aa, Artificial Sequence
  Cleavage product
LYSGPIWELKKDVYVVELDWYPDAPGEMVVLTCDTPEEDGITWTLDQSSEVLGSGKTLTIQVKEFGDAGQYTCHKGGEVLSHSLLLLHKKEDGIWSTDILKDQKEPKNKTFLRCEAKNYSGRFTCWWLTTISTDLTFSVKSSRGSSDPQGVTCGAATLSAERVRGDNKEYEYSVECQEDSACPAAEESLPIEVMVDAVHKLKYENYTSSFFIRDIIKPDPPKNLQLKPLKNSRQVEVSWEYPDTWSTPHSYFSLTFSVQVQGKSKREKKDRVFTDKTSATVICRKNASISVRAQDRYYSSSWSEWASVPCSGGGGSGGGGSGGGGSRNLPVATPDPGMFPCLHHSQNLLRAVSNMLQKARQTLEFYPCTSEEIDHEDITKDKTSTVEACLPLELTKNESCLNSRETSFITNGSCLASRKTSFMMALCLSSIYEDLKMYQVEFKTMNAKLLMDPKRQIFLDQNMLAVIDELMQALNFNSETVPQKSSLEEPDFYKTKIKLCILLHAFRIRAVTIDRVMSYLNAS

SEQ ID NO: 67 - protein, 521 aa, Artificial Sequence
  Cleavage product
LYSGPIWELKKDVYVVELDWYPDAPGEMVVLTCDTPEEDGITWTLDQSSEVLGSGKTLTIQVKEFGDAGQYTCHKGGEVLSHSLLLLHKKEDGIWSTDILKDQKEPKNKTFLRCEAKNYSGRFTCWWLTTISTDLTFSVKSSRGSSDPQGVTCGAATLSAERVRGDNKEYEYSVECQEDSACPAAEESLPIEVMVDAVHKLKYENYTSSFFIRDIIKPDPPKNLQLKPLKNSRQVEVSWEYPDTWSTPHSYFSLTFSVQVQGKDNTEGRVFTDKTSATVICRKNASISVRAQDRYYSSSWSEWASVPCSGGGGSGGGGSGGGGSRNLPVATPDPGMFPCLHHSQNLLRAVSNMLQKARQTLEFYPCTSEEIDHEDITKDKTSTVEACLPLELTKNESCLNSRETSFITNGSCLASRKTSFMMALCLSSIYEDLKMYQVEFKTMNAKLLMDPKRQIFLDQNMLAVIDELMQALNFNSETVPQKSSLEEPDFYKTKIKLCILLHAFRIRAVTIDRVMSYLNAS

SEQ ID NO: 68 - protein, 521 aa, Artificial Sequence; identical to SEQ ID NO: 67
  Cleavage product

SEQ ID NO: 69 - protein, 523 aa, Artificial Sequence
  Cleavage product
LYHPSGPIWELKKDVYVVELDWYPDAPGEMVVLTCDTPEEDGITWTLDQSSEVLGSGKTLTIQVKEFGDAGQYTCHKGGEVLSHSLLLLHKKEDGIWSTDILKDQKEPKNKTFLRCEAKNYSGRFTCWWLTTISTDLTFSVKSSRGSSDPQGVTCGAATLSAERVRGDNKEYEYSVECQEDSACPAAEESLPIEVMVDAVHKLKYENYTSSFFIRDIIKPDPPKNLQLKPLKNSRQVEVSWEYPDTWSTPHSYFSLTFSVQVQGKDNTEGRVFTDKTSATVICRKNASISVRAQDRYYSSSWSEWASVPCSGGGGSGGGGSGGGGSRNLPVATPDPGMFPCLHHSQNLLRAVSNMLQKARQTLEFYPCTSEEIDHEDITKDKTSTVEACLPLELTKNESCLNSRETSFITNGSCLASRKTSFMMALCLSSIYEDLKMYQVEFKTMNAKLLMDPKRQIFLDQNMLAVIDELMQALNFNSETVPQKSSLEEPDFYKTKIKLCILLHAFRIRAVTIDRVMSYLNAS

SEQ ID NO: 70 - protein, 523 aa, Artificial Sequence; identical to SEQ ID NO: 69
  Cleavage product

SEQ ID NO: 71 - protein, 523 aa, Artificial Sequence
  Cleavage product
SGRSSGPIWELKKDVYVVELDWYPDAPGEMVVLTCDTPEEDGITWTLDQSSEVLGSGKTLTIQVKEFGDAGQYTCHKGGEVLSHSLLLLHKKEDGIWSTDILKDQKEPKNKTFLRCEAKNYSGRFTCWWLTTISTDLTFSVKSSRGSSDPQGVTCGAATLSAERVRGDNKEYEYSVECQEDSACPAAEESLPIEVMVDAVHKLKYENYTSSFFIRDIIKPDPPKNLQLKPLKNSRQVEVSWEYPDTWSTPHSYFSLTFSVQVQGKDNTEGRVFTDKTSATVICRKNASISVRAQDRYYSSSWSEWASVPCSGGGGSGGGGSGGGGSRNLPVATPDPGMFPCLHHSQNLLRAVSNMLQKARQTLEFYPCTSEEIDHEDITKDKTSTVEACLPLELTKNESCLNSRETSFITNGSCLASRKTSFMMALCLSSIYEDLKMYQVEFKTMNAKLLMDPKRQIFLDQNMLAVIDELMQALNFNSETVPQKSSLEEPDFYKTKIKLCILLHAFRIRAVTIDRVMSYLNAS

SEQ ID NO: 72 - protein, 523 aa, Artificial Sequence; identical to SEQ ID NO: 71
  Cleavage product

SEQ ID NO: 73 - protein, 523 aa, Artificial Sequence; identical to SEQ ID NO: 71
  Cleavage product

SEQ ID NO: 74 - protein, 523 aa, Artificial Sequence; identical to SEQ ID NO: 71
  Cleavage product

SEQ ID NO: 75 - protein, 523 aa, Artificial Sequence
  Cleavage product
FMLTSGPIWELKKDVYVVELDWYPDAPGEMVVLTCDTPEEDGITWTLDQSSEVLGSGKTLTIQVKEFGDAGQYTCHKGGEVLSHSLLLLHKKEDGIWSTDILKDQKEPKNKTFLRCEAKNYSGRFTCWWLTTISTDLTFSVKSSRGSSDPQGVTCGAATLSAERVRGDNKEYEYSVECQEDSACPAAEESLPIEVMVDAVHKLKYENYTSSFFIRDIIKPDPPKNLQLKPLKNSRQVEVSWEYPDTWSTPHSYFSLTFSVQVQGKDNTEGRVFTDKTSATVICRKNASISVRAQDRYYSSSWSEWASVPCSGGGGSGGGGSGGGGSRNLPVATPDPGMFPCLHHSQNLLRAVSNMLQKARQTLEFYPCTSEEIDHEDITKDKTSTVEACLPLELTKNESCLNSRETSFITNGSCLASRKTSFMMALCLSSIYEDLKMYQVEFKTMNAKLLMDPKRQIFLDQNMLAVIDELMQALNFNSETVPQKSSLEEPDFYKTKIKLCILLHAFRIRAVTIDRVMSYLNAS

SEQ ID NO: 76 - protein, 523 aa, Artificial Sequence; identical to SEQ ID NO: 75
  Cleavage product

SEQ ID NO: 77 - protein, 523 aa, Artificial Sequence
  Cleavage product
VKSPSGPIWELKKDVYVVELDWYPDAPGEMVVLTCDTPEEDGITWTLDQSSEVLGSGKTLTIQVKEFGDAGQYTCHKGGEVLSHSLLLLHKKEDGIWSTDILKDQKEPKNKTFLRCEAKNYSGRFTCWWLTTISTDLTFSVKSSRGSSDPQGVTCGAATLSAERVRGDNKEYEYSVECQEDSACPAAEESLPIEVMVDAVHKLKYENYTSSFFIRDIIKPDPPKNLQLKPLKNSRQVEVSWEYPDTWSTPHSYFSLTFSVQVQGKDNTEGRVFTDKTSATVICRKNASISVRAQDRYYSSSWSEWASVPCSGGGGSGGGGSGGGGSRNLPVATPDPGMFPCLHHSQNLLRAVSNMLQKARQTLEFYPCTSEEIDHEDITKDKTSTVEACLPLELTKNESCLNSRETSFITNGSCLASRKTSFMMALCLSSIYEDLKMYQVEFKTMNAKLLMDPKRQIFLDQNMLAVIDELMQALNFNSETVPQKSSLEEPDFYKTKIKLCILLHAFRIRAVTIDRVMSYLNAS

SEQ ID NO: 78 - protein, 523 aa, Artificial Sequence; identical to SEQ ID NO: 77
  Cleavage product

SEQ ID NO: 79 - protein, 523 aa, Artificial Sequence; identical to SEQ ID NO: 77
  Cleavage product

SEQ ID NO: 80 - protein, 523 aa, Artificial Sequence; identical to SEQ ID NO: 77
  Cleavage product

SEQ ID NO: 81 - protein, 532 aa, Artificial Sequence
  Polypeptide chain
DKTHTCPPCPAPELLGGPSVFLFPPKPKDTLMISRTPEVTCVVVDVSHEDPEVKFNWYVDGVEVHNAKTKPREEQYASTYRVVSVLTVLHQDWLNGKEYKCKVSNKALPAPIEKTISKAKGQPREPQVCTLPPSRDELTKNQVSLSCAVKGFYPSDIAVEWESNGQPENNYKTTPPVLDSDGSFFLVSKLTVDKSRWQQGNVFSCSVMHEALHNHYTQKSLSLSPGGGGGSGGGGSKIDACKRGDVTVKPSHVILLGSTVNITCSLKPRQGCFHYSRRNKLILYKFDRRINFHHGHSLNSQVTGLPLGTTLFVCKLACINSDEIQICGAEIFVGVAPEQPQNLSCIQKGEQGTVACTWERGRDTHLYTEYTLQLSGPKNLTWQKQCKDIYCDYLDFGINLTPESPESNFTAKVTAVNSLGSSSSLPSTFTFLDIVRPLPPWDIRIKFQKASVSRSTLYWRDEGLVLLNRLRYRPSNSRLWNMVNVTKAKGRHDLLDLKPFTEYEFQISSKLHLYKGSWSDWSESLRAQTPEE

SEQ ID NO: 82 - protein, 527 aa, Artificial Sequence
  Polypeptide chain
DKTHTCPPCPAPELLGGPSVFLFPPKPKDTLMISRTPEVTCVVVDVSHEDPEVKFNWYVDGVEVHNAKTKPREEQYASTYRVVSVLTVLHQDWLNGKEYKCKVSNKALPAPIEKTISKAKGQPREPQVCTLPPSRDELTKNQVSLSCAVKGFYPSDIAVEWESNGQPENNYKTTPPVLDSDGSFFLVSKLTVDKSRWQQGNVFSCSVMHEALHNHYTQKSLSLSPGGGSPGKIDACKRGDVTVKPSHVILLGSTVNITCSLKPRQGCFHYSRRNKLILYKFDRRINFHHGHSLNSQVTGLPLGTTLFVCKLACINSDEIQICGAEIFVGVAPEQPQNLSCIQKGEQGTVACTWERGRDTHLYTEYTLQLSGPKNLTWQKQCKDIYCDYLDFGINLTPESPESNFTAKVTAVNSLGSSSSLPSTFTFLDIVRPLPPWDIRIKFQKASVSRSTLYWRDEGLVLLNRLRYRPSNSRLWNMVNVTKAKGRHDLLDLKPFTEYEFQISSKLHLYKGSWSDWSESLRAQTPEE

SEQ ID NO: 83 - protein, 528 aa, Artificial Sequence
  Polypeptide chain
DKTHTCPPCPAPELLGGPSVFLFPPKPKDTLMISRTPEVTCVVVDVSHEDPEVKFNWYVDGVEVHNAKTKPREEQYASTYRVVSVLTVLHQDWLNGKEYKCKVSNKALPAPIEKTISKAKGQPREPQVCTLPPSRDELTKNQVSLSCAVKGFYPSDIAVEWESNGQPENNYKTTPPVLDSDGSFFLVSKLTVDKSRWQQGNVFSCSVMHEALHNHYTQKSLSLSPGPGGSGPKIDACKRGDVTVKPSHVILLGSTVNITCSLKPRQGCFHYSRRNKLILYKFDRRINFHHGHSLNSQVTGLPLGTTLFVCKLACINSDEIQICGAEIFVGVAPEQPQNLSCIQKGEQGTVACTWERGRDTHLYTEYTLQLSGPKNLTWQKQCKDIYCDYLDFGINLTPESPESNFTAKVTAVNSLGSSSSLPSTFTFLDIVRPLPPWDIRIKFQKASVSRSTLYWRDEGLVLLNRLRYRPSNSRLWNMVNVTKAKGRHDLLDLKPFTEYEFQISSKLHLYKGSWSDWSESLRAQTPEE

SEQ ID NO: 84 - protein, 530 aa, Artificial Sequence
  Polypeptide chain
DKTHTCPPCPAPELLGGPSVFLFPPKPKDTLMISRTPEVTCVVVDVSHEDPEVKFNWYVDGVEVHNAKTKPREEQYASTYRVVSVLTVLHQDWLNGKEYKCKVSNKALPAPIEKTISKAKGQPREPQVCTLPPSRDELTKNQVSLSCAVKGFYPSDIAVEWESNGQPENNYKTTPPVLDSDGSFFLVSKLTVDKSRWQQGNVFSCSVMHEALHNHYTQKSLSLSPGGGSGGGSGKIDACKRGDVTVKPSHVILLGSTVNITCSLKPRQGCFHYSRRNKLILYKFDRRINFHHGHSLNSQVTGLPLGTTLFVCKLACINSDEIQICGAEIFVGVAPEQPQNLSCIQKGEQGTVACTWERGRDTHLYTEYTLQLSGPKNLTWQKQCKDIYCDYLDFGINLTPESPESNFTAKVTAVNSLGSSSSLPSTFTFLDIVRPLPPWDIRIKFQKASVSRSTLYWRDEGLVLLNRLRYRPSNSRLWNMVNVTKAKGRHDLLDLKPFTEYEFQISSKLHLYKGSWSDWSESLRAQTPEE

SEQ ID NO: 85 - protein, 762 aa, Artificial Sequence
  Polypeptide chain
DKTHTCPPCPAPELLGGPSVFLFPPKPKDTLMISRTPEVTCVVVDVSHEDPEVKFNWYVDGVEVHNAKTKPREEQYASTYRVVSVLTVLHQDWLNGKEYKCKVSNKALPAPIEKTISKAKGQPREPQVYTLPPCRDELTKNQVSLWCLVKGFYPSDIAVEWESNGQPENNYKTTPPVLDSDGSFFLYSKLTVDKSRWQQGNVFSCSVMHEALHNHYTQKSLSLSPGGGSGGSGGSGGSGGSSGPIWELKKDVYVVELDWYPDAPGEMVVLTCDTPEEDGITWTLDQSSEVLGSGKTLTIQVKEFGDAGQYTCHKGGEVLSHSLLLLHKKEDGIWSTDILKDQKEPKNKTFLRCEAKNYSGRFTCWWLTTISTDLTFSVKSSRGSSDPQGVTCGAATLSAERVRGDNKEYEYSVECQEDSACPAAEESLPIEVMVDAVHKLKYENYTSSFFIRDIIKPDPPKNLQLKPLKNSRQVEVSWEYPDTWSTPHSYFSLTFCVQVQGKSKREKKDRVFTDKTSATVICRKNASISVRAQDRYYSSSWSEWASVPCSGGGGSGGGGSGGGGSRNLPVATPDPGMFPCLHHSQNLLRAVSNMLQKARQTLEFYPCTSEEIDHEDITKDKTSTVEACLPLELTKNESCLNSRETSFITNGSCLASRKTSFMMALCLSSIYEDLKMYQVEFKTMNAKLLMDPKRQIFLDQNMLAVIDELMQALNFNSETVPQKSSLEEPDFYKTKIKLCILLHAFRIRAVTIDRVMSYLNAS

SEQ ID NO: 86 - protein, 759 aa, Artificial Sequence
  Polypeptide chain
DKTHTCPPCPAPELLGGPSVFLFPPKPKDTLMISRTPEVTCVVVDVSHEDPEVKFNWYVDGVEVHNAKTKPREEQYASTYRVVSVLTVLHQDWLNGKEYKCKVSNKALPAPIEKTISKAKGQPREPQVYTLPPCRDELTKNQVSLWCLVKGFYPSDIAVEWESNGQPENNYKTTPPVLDSDGSFFLYSKLTVDKSRWQQGNVFSCSVMHEALHNHYTQKSLSLSPGGGSGGSGGSGGSGGSSGPIWELKKDVYVVELDWYPDAPGEMVVLTCDTPEEDGITWTLDQSSEVLGSGKTLTIQVKEFGDAGQYTCHKGGEVLSHSLLLLHKKEDGIWSTDILKDQKEPKNKTFLRCEAKNYSGRFTCWWLTTISTDLTFSVKSSRGSSDPQGVTCGAATLSAERVRGDNKEYEYSVECQEDSACPAAEESLPIEVMVDAVHKLKYENYTSSFFIRDIIKPDPPKNLQLKPLKNSRQVEVSWEYPDTWSTPHSYFSLTFCVQVQGKDNTERVFTDKTSATVICRKNASISVRAQDRYYSSSWSEWASVPCSGGGGSGGGGSGGGGSRNLPVATPDPGMFPCLHHSQNLLRAVSNMLQKARQTLEFYPCTSEEIDHEDITKDKTSTVEACLPLELTKNESCLNSRETSFITNGSCLASRKTSFMMALCLSSIYEDLKMYQVEFKTMNAKLLMDPKRQIFLDQNMLAVIDELMQALNFNSETVPQKSSLEEPDFYKTKIKLCILLHAFRIRAVTIDRVMSYLNAS

SEQ ID NO: 87 - protein, 760 aa, Artificial Sequence
  Polypeptide chain
DKTHTCPPCPAPELLGGPSVFLFPPKPKDTLMISRTPEVTCVVVDVSHEDPEVKFNWYVDGVEVHNAKTKPREEQYASTYRVVSVLTVLHQDWLNGKEYKCKVSNKALPAPIEKTISKAKGQPREPQVYTLPPCRDELTKNQVSLWCLVKGFYPSDIAVEWESNGQPENNYKTTPPVLDSDGSFFLYSKLTVDKSRWQQGNVFSCSVMHEALHNHYTQKSLSLSPGGGSGGSGGSGGSGGSSGPIWELKKDVYVVELDWYPDAPGEMVVLTCDTPEEDGITWTLDQSSEVLGSGKTLTIQVKEFGDAGQYTCHKGGEVLSHSLLLLHKKEDGIWSTDILKDQKEPKNKTFLRCEAKNYSGRFTCWWLTTISTDLTFSVKSSRGSSDPQGVTCGAATLSAERVRGDNKEYEYSVECQEDSACPAAEESLPIEVMVDAVHKLKYENYTSSFFIRDIIKPDPPKNLQLKPLKNSRQVEVSWEYPDTWSTPHSYFSLTFCVQVQGKDNTEGRVFTDKTSATVICRKNASISVRAQDRYYSSSWSEWASVPCSGGGGSGGGGSGGGGSRNLPVATPDPGMFPCLHHSQNLLRAVSNMLQKARQTLEFYPCTSEEIDHEDITKDKTSTVEACLPLELTKNESCLNSRETSFITNGSCLASRKTSFMMALCLSSIYEDLKMYQVEFKTMNAKLLMDPKRQIFLDQNMLAVIDELMQALNFNSETVPQKSSLEEPDFYKTKIKLCILLHAFRIRAVTIDRVMSYLNAS

SEQ ID NO: 88 - protein, 762 aa, Artificial Sequence
  Polypeptide chain
DKTHTCPPCPAPELLGGPSVFLFPPKPKDTLMISRTPEVTCVVVDVSHEDPEVKFNWYVDGVEVHNAKTKPREEQYASTYRVVSVLTVLHQDWLNGKEYKCKVSNKALPAPIEKTISKAKGQPREPQVYTLPPCRDELTKNQVSLWCLVKGFYPSDIAVEWESNGQPENNYKTTPPVLDSDGSFFLYSKLTVDKSRWQQGNVFSCSVMHEALHNHYTQKSLSLSPGGGSGGSGGSVPLSLYSGPIWELKKDVYVVELDWYPDAPGEMVVLTCDTPEEDGITWTLDQSSEVLGSGKTLTIQVKEFGDAGQYTCHKGGEVLSHSLLLLHKKEDGIWSTDILKDQKEPKNKTFLRCEAKNYSGRFTCWWLTTISTDLTFSVKSSRGSSDPQGVTCGAATLSAERVRGDNKEYEYSVECQEDSACPAAEESLPIEVMVDAVHKLKYENYTSSFFIRDIIKPDPPKNLQLKPLKNSRQVEVSWEYPDTWSTPHSYFSLTFSVQVQGKSKREKKDRVFTDKTSATVICRKNASISVRAQDRYYSSSWSEWASVPCSGGGGSGGGGSGGGGSRNLPVATPDPGMFPCLHHSQNLLRAVSNMLQKARQTLEFYPCTSEEIDHEDITKDKTSTVEACLPLELTKNESCLNSRETSFITNGSCLASRKTSFMMALCLSSIYEDLKMYQVEFKTMNAKLLMDPKRQIFLDQNMLAVIDELMQALNFNSETVPQKSSLEEPDFYKTKIKLCILLHAFRIRAVTIDRVMSYLNAS

SEQ ID NO: 89 - protein, 760 aa, Artificial Sequence
  Polypeptide chain
DKTHTCPPCPAPELLGGPSVFLFPPKPKDTLMISRTPEVTCVVVDVSHEDPEVKFNWYVDGVEVHNAKTKPREEQYASTYRVVSVLTVLHQDWLNGKEYKCKVSNKALPAPIEKTISKAKGQPREPQVYTLPPCRDELTKNQVSLWCLVKGFYPSDIAVEWESNGQPENNYKTTPPVLDSDGSFFLYSKLTVDKSRWQQGNVFSCSVMHEALHNHYTQKSLSLSPGGGSGGSGGSVPLSLYSGPIWELKKDVYVVELDWYPDAPGEMVVLTCDTPEEDGITWTLDQSSEVLGSGKTLTIQVKEFGDAGQYTCHKGGEVLSHSLLLLHKKEDGIWSTDILKDQKEPKNKTFLRCEAKNYSGRFTCWWLTTISTDLTFSVKSSRGSSDPQGVTCGAATLSAERVRGDNKEYEYSVECQEDSACPAAEESLPIEVMVDAVHKLKYENYTSSFFIRDIIKPDPPKNLQLKPLKNSRQVEVSWEYPDTWSTPHSYFSLTFSVQVQGKDNTEGRVFTDKTSATVICRKNASISVRAQDRYYSSSWSEWASVPCSGGGGSGGGGSGGGGSRNLPVATPDPGMFPCLHHSQNLLRAVSNMLQKARQTLEFYPCTSEEIDHEDITKDKTSTVEACLPLELTKNESCLNSRETSFITNGSCLASRKTSFMMALCLSSIYEDLKMYQVEFKTMNAKLLMDPKRQIFLDQNMLAVIDELMQALNFNSETVPQKSSLEEPDFYKTKIKLCILLHAFRIRAVTIDRVMSYLNAS

SEQ ID NO: 90 - protein, 757 aa, Artificial Sequence
  Polypeptide chain
DKTHTCPPCPAPELLGGPSVFLFPPKPKDTLMISRTPEVTCVVVDVSHEDPEVKFNWYVDGVEVHNAKTKPREEQYASTYRVVSVLTVLHQDWLNGKEYKCKVSNKALPAPIEKTISKAKGQPREPQVYTLPPCRDELTKNQVSLWCLVKGFYPSDIAVEWESNGQPENNYKTTPPVLDSDGSFFLYSKLTVDKSRWQQGNVFSCSVMHEALHNHYTQKSLSLSPGGGSGGSVPLSLYSGPIWELKKDVYVVELDWYPDAPGEMVVLTCDTPEEDGITWTLDQSSEVLGSGKTLTIQVKEFGDAGQYTCHKGGEVLSHSLLLLHKKEDGIWSTDILKDQKEPKNKTFLRCEAKNYSGRFTCWWLTTISTDLTFSVKSSRGSSDPQGVTCGAATLSAERVRGDNKEYEYSVECQEDSACPAAEESLPIEVMVDAVHKLKYENYTSSFFIRDIIKPDPPKNLQLKPLKNSRQVEVSWEYPDTWSTPHSYFSLTFSVQVQGKDNTEGRVFTDKTSATVICRKNASISVRAQDRYYSSSWSEWASVPCSGGGGSGGGGSGGGGSRNLPVATPDPGMFPCLHHSQNLLRAVSNMLQKARQTLEFYPCTSEEIDHEDITKDKTSTVEACLPLELTKNESCLNSRETSFITNGSCLASRKTSFMMALCLSSIYEDLKMYQVEFKTMNAKLLMDPKRQIFLDQNMLAVIDELMQALNFNSETVPQKSSLEEPDFYKTKIKLCILLHAFRIRAVTIDRVMSYLNAS

SEQ ID NO: 91 - protein, 759 aa, Artificial Sequence
  Polypeptide chain
DKTHTCPPCPAPELLGGPSVFLFPPKPKDTLMISRTPEVTCVVVDVSHEDPEVKFNWYVDGVEVHNAKTKPREEQYASTYRVVSVLTVLHQDWLNGKEYKCKVSNKALPAPIEKTISKAKGQPREPQVYTLPPCRDELTKNQVSLWCLVKGFYPSDIAVEWESNGQPENNYKTTPPVLDSDGSFFLYSKLTVDKSRWQQGNVFSCSVMHEALHNHYTQKSLSLSPGGGSGGSMPYDLYHPSGPIWELKKDVYVVELDWYPDAPGEMVVLTCDTPEEDGITWTLDQSSEVLGSGKTLTIQVKEFGDAGQYTCHKGGEVLSHSLLLLHKKEDGIWSTDILKDQKEPKNKTFLRCEAKNYSGRFTCWWLTTISTDLTFSVKSSRGSSDPQGVTCGAATLSAERVRGDNKEYEYSVECQEDSACPAAEESLPIEVMVDAVHKLKYENYTSSFFIRDIIKPDPPKNLQLKPLKNSRQVEVSWEYPDTWSTPHSYFSLTFSVQVQGKDNTEGRVFTDKTSATVICRKNASISVRAQDRYYSSSWSEWASVPCSGGGGSGGGGSGGGGSRNLPVATPDPGMFPCLHHSQNLLRAVSNMLQKARQTLEFYPCTSEEIDHEDITKDKTSTVEACLPLELTKNESCLNSRETSFITNGSCLASRKTSFMMALCLSSIYEDLKMYQVEFKTMNAKLLMDPKRQIFLDQNMLAVIDELMQALNFNSETVPQKSSLEEPDFYKTKIKLCILLHAFRIRAVTIDRVMSYLNAS

SEQ ID NO: 92 - protein, 762 aa, Artificial Sequence
  Polypeptide chain
DKTHTCPPCPAPELLGGPSVFLFPPKPKDTLMISRTPEVTCVVVDVSHEDPEVKFNWYVDGVEVHNAKTKPREEQYASTYRVVSVLTVLHQDWLNGKEYKCKVSNKALPAPIEKTISKAKGQPREPQVYTLPPCRDELTKNQVSLWCLVKGFYPSDIAVEWESNGQPENNYKTTPPVLDSDGSFFLYSKLTVDKSRWQQGNVFSCSVMHEALHNHYTQKSLSLSPGGGSGGSGGSMPYDLYHPSGPIWELKKDVYVVELDWYPDAPGEMVVLTCDTPEEDGITWTLDQSSEVLGSGKTLTIQVKEFGDAGQYTCHKGGEVLSHSLLLLHKKEDGIWSTDILKDQKEPKNKTFLRCEAKNYSGRFTCWWLTTISTDLTFSVKSSRGSSDPQGVTCGAATLSAERVRGDNKEYEYSVECQEDSACPAAEESLPIEVMVDAVHKLKYENYTSSFFIRDIIKPDPPKNLQLKPLKNSRQVEVSWEYPDTWSTPHSYFSLTFSVQVQGKDNTEGRVFTDKTSATVICRKNASISVRAQDRYYSSSWSEWASVPCSGGGGSGGGGSGGGGSRNLPVATPDPGMFPCLHHSQNLLRAVSNMLQKARQTLEFYPCTSEEIDHEDITKDKTSTVEACLPLELTKNESCLNSRETSFITNGSCLASRKTSFMMALCLSSIYEDLKMYQVEFKTMNAKLLMDPKRQIFLDQNMLAVIDELMQALNFNSETVPQKSSLEEPDFYKTKIKLCILLHAFRIRAVTIDRVMSYLNAS

SEQ ID NO: 93 - protein, 761 aa, Artificial Sequence
  Polypeptide chain
DKTHTCPPCPAPELLGGPSVFLFPPKPKDTLMISRTPEVTCVVVDVSHEDPEVKFNWYVDGVEVHNAKTKPREEQYASTYRVVSVLTVLHQDWLNGKEYKCKVSNKALPAPIEKTISKAKGQPREPQVYTLPPCRDELTKNQVSLWCLVKGFYPSDIAVEWESNGQPENNYKTTPPVLDSDGSFFLYSKLTVDKSRWQQGNVFSCSVMHEALHNHYTQKSLSLSPGGGSGGSISSGLLSGRSSGPIWELKKDVYVVELDWYPDAPGEMVVLTCDTPEEDGITWTLDQSSEVLGSGKTLTIQVKEFGDAGQYTCHKGGEVLSHSLLLLHKKEDGIWSTDILKDQKEPKNKTFLRCEAKNYSGRFTCWWLTTISTDLTFSVKSSRGSSDPQGVTCGAATLSAERVRGDNKEYEYSVECQEDSACPAAEESLPIEVMVDAVHKLKYENYTSSFFIRDIIKPDPPKNLQLKPLKNSRQVEVSWEYPDTWSTPHSYFSLTFSVQVQGKDNTEGRVFTDKTSATVICRKNASISVRAQDRYYSSSWSEWASVPCSGGGGSGGGGSGGGGSRNLPVATPDPGMFPCLHHSQNLLRAVSNMLQKARQTLEFYPCTSEEIDHEDITKDKTSTVEACLPLELTKNESCLNSRETSFITNGSCLASRKTSFMMALCLSSIYEDLKMYQVEFKTMNAKLLMDPKRQIFLDQNMLAVIDELMQALNFNSETVPQKSSLEEPDFYKTKIKLCILLHAFRIRAVTIDRVMSYLNAS

SEQ ID NO: 94 - protein, 764 aa, Artificial Sequence
  Polypeptide chain
DKTHTCPPCPAPELLGGPSVFLFPPKPKDTLMISRTPEVTCVVVDVSHEDPEVKFNWYVDGVEVHNAKTKPREEQYASTYRVVSVLTVLHQDWLNGKEYKCKVSNKALPAPIEKTISKAKGQPREPQVYTLPPCRDELTKNQVSLWCLVKGFYPSDIAVEWESNGQPENNYKTTPPVLDSDGSFFLYSKLTVDKSRWQQGNVFSCSVMHEALHNHYTQKSLSLSPGGGSGGSGGSISSGLLSGRSSGPIWELKKDVYVVELDWYPDAPGEMVVLTCDTPEEDGITWTLDQSSEVLGSGKTLTIQVKEFGDAGQYTCHKGGEVLSHSLLLLHKKEDGIWSTDILKDQKEPKNKTFLRCEAKNYSGRFTCWWLTTISTDLTFSVKSSRGSSDPQGVTCGAATLSAERVRGDNKEYEYSVECQEDSACPAAEESLPIEVMVDAVHKLKYENYTSSFFIRDIIKPDPPKNLQLKPLKNSRQVEVSWEYPDTWSTPHSYFSLTFSVQVQGKDNTEGRVFTDKTSATVICRKNASISVRAQDRYYSSSWSEWASVPCSGGGGSGGGGSGGGGSRNLPVATPDPGMFPCLHHSQNLLRAVSNMLQKARQTLEFYPCTSEEIDHEDITKDKTSTVEACLPLELTKNESCLNSRETSFITNGSCLASRKTSFMMALCLSSIYEDLKMYQVEFKTMNAKLLMDPKRQIFLDQNMLAVIDELMQALNFNSETVPQKSSLEEPDFYKTKIKLCILLHAFRIRAVTIDRVMSYLNAS

SEQ ID NO: 95 - protein, 759 aa, Artificial Sequence
  Polypeptide chain
DKTHTCPPCPAPELLGGPSVFLFPPKPKDTLMISRTPEVTCVVVDVSHEDPEVKFNWYVDGVEVHNAKTKPREEQYASTYRVVSVLTVLHQDWLNGKEYKCKVSNKALPAPIEKTISKAKGQPREPQVYTLPPCRDELTKNQVSLWCLVKGFYPSDIAVEWESNGQPENNYKTTPPVLDSDGSFFLYSKLTVDKSRWQQGNVFSCSVMHEALHNHYTQKSLSLSPGGGSGGSDSGGFMLTSGPIWELKKDVYVVELDWYPDAPGEMVVLTCDTPEEDGITWTLDQSSEVLGSGKTLTIQVKEFGDAGQYTCHKGGEVLSHSLLLLHKKEDGIWSTDILKDQKEPKNKTFLRCEAKNYSGRFTCWWLTTISTDLTFSVKSSRGSSDPQGVTCGAATLSAERVRGDNKEYEYSVECQEDSACPAAEESLPIEVMVDAVHKLKYENYTSSFFIRDIIKPDPPKNLQLKPLKNSRQVEVSWEYPDTWSTPHSYFSLTFSVQVQGKDNTEGRVFTDKTSATVICRKNASISVRAQDRYYSSSWSEWASVPCSGGGGSGGGGSGGGGSRNLPVATPDPGMFPCLHHSQNLLRAVSNMLQKARQTLEFYPCTSEEIDHEDITKDKTSTVEACLPLELTKNESCLNSRETSFITNGSCLASRKTSFMMALCLSSIYEDLKMYQVEFKTMNAKLLMDPKRQIFLDQNMLAVIDELMQALNFNSETVPQKSSLEEPDFYKTKIKLCILLHAFRIRAVTIDRVMSYLNAS

SEQ ID NO: 96 - protein, 762 aa, Artificial Sequence
  Polypeptide chain
DKTHTCPPCPAPELLGGPSVFLFPPKPKDTLMISRTPEVTCVVVDVSHEDPEVKFNWYVDGVEVHNAKTKPREEQYASTYRVVSVLTVLHQDWLNGKEYKCKVSNKALPAPIEKTISKAKGQPREPQVYTLPPCRDELTKNQVSLWCLVKGFYPSDIAVEWESNGQPENNYKTTPPVLDSDGSFFLYSKLTVDKSRWQQGNVFSCSVMHEALHNHYTQKSLSLSPGGGSGGSGGSDSGGFMLTSGPIWELKKDVYVVELDWYPDAPGEMVVLTCDTPEEDGITWTLDQSSEVLGSGKTLTIQVKEFGDAGQYTCHKGGEVLSHSLLLLHKKEDGIWSTDILKDQKEPKNKTFLRCEAKNYSGRFTCWWLTTISTDLTFSVKSSRGSSDPQGVTCGAATLSAERVRGDNKEYEYSVECQEDSACPAAEESLPIEVMVDAVHKLKYENYTSSFFIRDIIKPDPPKNLQLKPLKNSRQVEVSWEYPDTWSTPHSYFSLTFSVQVQGKDNTEGRVFTDKTSATVICRKNASISVRAQDRYYSSSWSEWASVPCSGGGGSGGGGSGGGGSRNLPVATPDPGMFPCLHHSQNLLRAVSNMLQKARQTLEFYPCTSEEIDHEDITKDKTSTVEACLPLELTKNESCLNSRETSFITNGSCLASRKTSFMMALCLSSIYEDLKMYQVEFKTMNAKLLMDPKRQIFLDQNMLAVIDELMQALNFNSETVPQKSSLEEPDFYKTKIKLCILLHAFRIRAVTIDRVMSYLNAS

SEQ ID NO: 97 - protein, 759 aa, Artificial Sequence
  Polypeptide chain
DKTHTCPPCPAPELLGGPSVFLFPPKPKDTLMISRTPEVTCVVVDVSHEDPEVKFNWYVDGVEVHNAKTKPREEQYASTYRVVSVLTVLHQDWLNGKEYKCKVSNKALPAPIEKTISKAKGQPREPQVYTLPPCRDELTKNQVSLWCLVKGFYPSDIAVEWESNGQPENNYKTTPPVLDSDGSFFLYSKLTVDKSRWQQGNVFSCSVMHEALHNHYTQKSLSLSPGGGSGGSRAAAVKSPSGPIWELKKDVYVVELDWYPDAPGEMVVLTCDTPEEDGITWTLDQSSEVLGSGKTLTIQVKEFGDAGQYTCHKGGEVLSHSLLLLHKKEDGIWSTDILKDQKEPKNKTFLRCEAKNYSGRFTCWWLTTISTDLTFSVKSSRGSSDPQGVTCGAATLSAERVRGDNKEYEYSVECQEDSACPAAEESLPIEVMVDAVHKLKYENYTSSFFIRDIIKPDPPKNLQLKPLKNSRQVEVSWEYPDTWSTPHSYFSLTFSVQVQGKDNTEGRVFTDKTSATVICRKNASISVRAQDRYYSSSWSEWASVPCSGGGGSGGGGSGGGGSRNLPVATPDPGMFPCLHHSQNLLRAVSNMLQKARQTLEFYPCTSEEIDHEDITKDKTSTVEACLPLELTKNESCLNSRETSFITNGSCLASRKTSFMMALCLSSIYEDLKMYQVEFKTMNAKLLMDPKRQIFLDQNMLAVIDELMQALNFNSETVPQKSSLEEPDFYKTKIKLCILLHAFRIRAVTIDRVMSYLNAS

SEQ ID NO: 98 - protein, 762 aa, Artificial Sequence
  Polypeptide chain
DKTHTCPPCPAPELLGGPSVFLFPPKPKDTLMISRTPEVTCVVVDVSHEDPEVKFNWYVDGVEVHNAKTKPREEQYASTYRVVSVLTVLHQDWLNGKEYKCKVSNKALPAPIEKTISKAKGQPREPQVYTLPPCRDELTKNQVSLWCLVKGFYPSDIAVEWESNGQPENNYKTTPPVLDSDGSFFLYSKLTVDKSRWQQGNVFSCSVMHEALHNHYTQKSLSLSPGGGSGGSGGSRAAAVKSPSGPIWELKKDVYVVELDWYPDAPGEMVVLTCDTPEEDGITWTLDQSSEVLGSGKTLTIQVKEFGDAGQYTCHKGGEVLSHSLLLLHKKEDGIWSTDILKDQKEPKNKTFLRCEAKNYSGRFTCWWLTTISTDLTFSVKSSRGSSDPQGVTCGAATLSAERVRGDNKEYEYSVECQEDSACPAAEESLPIEVMVDAVHKLKYENYTSSFFIRDIIKPDPPKNLQLKPLKNSRQVEVSWEYPDTWSTPHSYFSLTFSVQVQGKDNTEGRVFTDKTSATVICRKNASISVRAQDRYYSSSWSEWASVPCSGGGGSGGGGSGGGGSRNLPVATPDPGMFPCLHHSQNLLRAVSNMLQKARQTLEFYPCTSEEIDHEDITKDKTSTVEACLPLELTKNESCLNSRETSFITNGSCLASRKTSFMMALCLSSIYEDLKMYQVEFKTMNAKLLMDPKRQIFLDQNMLAVIDELMQALNFNSETVPQKSSLEEPDFYKTKIKLCILLHAFRIRAVTIDRVMSYLNAS

SEQ ID NO: 99 - protein, 226 aa, Artificial Sequence; identical to SEQ ID NO: 25
  Fc

SEQ ID NO: 100 - protein, 226 aa, Artificial Sequence; identical to SEQ ID NO: 26
  Fc

SEQ ID NO: 101 - protein, 6 aa, Artificial Sequence
  Linker
GGSGGS

SEQ ID NO: 102 - protein, 9 aa, Artificial Sequence
  Linker
GGSGGSGGS

SEQ ID NO: 103 - protein, 10 aa, Artificial Sequence
  Linker
GGGGSGGGGS

SEQ ID NO: 104 - protein, 8 aa, Artificial Sequence
  Linker
GGSGGGSG

SEQ ID NO: 105 - protein, 5 aa, Artificial Sequence
  Linker
GGGGS

SEQ ID NO: 106 - protein, 6 aa, Artificial Sequence
  Cleavable peptide
VPLSLY

SEQ ID NO: 107 - protein, 522 aa, Artificial Sequence; identical to SEQ ID NO: 6
  Masking moiety

SEQ ID NO: 108 - protein, 213 aa, Artificial Sequence; identical to SEQ ID NO: 5
  Masking moiety

SEQ ID NO: 109 - protein, 599 aa, Artificial Sequence; identical to SEQ ID NO: 10
  Masking moiety

SEQ ID NO: 110 - protein, 296 aa, Artificial Sequence; identical to SEQ ID NO: 9
  Masking moiety

SEQ ID NO: 111 - protein, 199 aa, Artificial Sequence; identical to SEQ ID NO: 8
  Masking moiety

SEQ ID NO: 112 - protein, 189 aa, Artificial Sequence; identical to SEQ ID NO: 7
  Masking moiety

SEQ ID NO: 113 - protein, 187 aa, Artificial Sequence
  Masking moiety
KIDACKRGDVTVKPSHVILLGSTVNITCSLKPRQGCFHYSRRNKLILYKFDRRINFHHGHSLNSQVTGLPLGTTLFVCKLACINSDEIQICGAEIFVGVAPEQPQNLSCIQKGEQGTVACTWERGRDTHLYTEYTLQLSGPKNLTWQKQCKDIYCDYLDFGINLTPESPESNFTAKVTAVNSLGSSS

SEQ ID NO: 114 - protein, 186 aa, Artificial Sequence
  Masking moiety
KIDACKRGDVTVKPSHVILLGSTVNITCSLKPRQGCFHYSRRNKLILYKFDRRINFHHGHSLNSQVTGLPLGTTLFVCKLACINSDEIQICGAEIFVGVAPEQPQNLSCIQKGEQGTVACTWERGRDTHLYTEYTLQLSGPKNLTWQKQCKDIYCDYLDFGINLTPESPESNFTAKVTAVNSLGSS

SEQ ID NO: 115 - protein, 190 aa, Artificial Sequence
  Masking moiety
KIDACKRGDVTVKPSHVILLGSTVNITCSLKPRQGCFHYSRRNKLILYKFDRRINFHHGHSLNSQVTGLPLGTTLFVCKLACINSDEIQICGAEIFVGVAPEQPQNLSCIQKGEQGTVACTWERGRDTHLYTEYTLQLSGPKNLTWQKQCKDIYCDYLDFGINLTPESPESNFTAKVTAVNSLGSSSSLP

SEQ ID NO: 116 - protein, 191 aa, Artificial Sequence
  Masking moiety
KIDACKRGDVTVKPSHVILLGSTVNITCSLKPRQGCFHYSRRNKLILYKFDRRINFHHGHSLNSQVTGLPLGTTLFVCKLACINSDEIQICGAEIFVGVAPEQPQNLSCIQKGEQGTVACTWERGRDTHLYTEYTLQLSGPKNLTWQKQCKDIYCDYLDFGINLTPESPESNFTAKVTAVNSLGSSSSLPS

SEQ ID NO: 117 - protein, 192 aa, Artificial Sequence
  Masking moiety
KIDACKRGDVTVKPSHVILLGSTVNITCSLKPRQGCFHYSRRNKLILYKFDRRINFHHGHSLNSQVTGLPLGTTLFVCKLACINSDEIQICGAEIFVGVAPEQPQNLSCIQKGEQGTVACTWERGRDTHLYTEYTLQLSGPKNLTWQKQCKDIYCDYLDFGINLTPESPESNFTAKVTAVNSLGSSSSLPST

SEQ ID NO: 118 - protein, 193 aa, Artificial Sequence
  Masking moiety
KIDACKRGDVTVKPSHVILLGSTVNITCSLKPRQGCFHYSRRNKLILYKFDRRINFHHGHSLNSQVTGLPLGTTLFVCKLACINSDEIQICGAEIFVGVAPEQPQNLSCIQKGEQGTVACTWERGRDTHLYTEYTLQLSGPKNLTWQKQCKDIYCDYLDFGINLTPESPESNFTAKVTAVNSLGSSSSLPSTF

SEQ ID NO: 119 - protein, 194 aa, Artificial Sequence
  Masking moiety
KIDACKRGDVTVKPSHVILLGSTVNITCSLKPRQGCFHYSRRNKLILYKFDRRINFHHGHSLNSQVTGLPLGTTLFVCKLACINSDEIQICGAEIFVGVAPEQPQNLSCIQKGEQGTVACTWERGRDTHLYTEYTLQLSGPKNLTWQKQCKDIYCDYLDFGINLTPESPESNFTAKVTAVNSLGSSSSLPSTFT

SEQ ID NO: 120 - protein, 195 aa, Artificial Sequence
  Masking moiety
KIDACKRGDVTVKPSHVILLGSTVNITCSLKPRQGCFHYSRRNKLILYKFDRRINFHHGHSLNSQVTGLPLGTTLFVCKLACINSDEIQICGAEIFVGVAPEQPQNLSCIQKGEQGTVACTWERGRDTHLYTEYTLQLSGPKNLTWQKQCKDIYCDYLDFGINLTPESPESNFTAKVTAVNSLGSSSSLPSTFTF

SEQ ID NO: 121 - protein, 196 aa, Artificial Sequence
  Masking moiety
KIDACKRGDVTVKPSHVILLGSTVNITCSLKPRQGCFHYSRRNKLILYKFDRRINFHHGHSLNSQVTGLPLGTTLFVCKLACINSDEIQICGAEIFVGVAPEQPQNLSCIQKGEQGTVACTWERGRDTHLYTEYTLQLSGPKNLTWQKQCKDIYCDYLDFGINLTPESPESNFTAKVTAVNSLGSSSSLPSTFTFL

SEQ ID NO: 122 - protein, 197 aa, Artificial Sequence
  Masking moiety
KIDACKRGDVTVKPSHVILLGSTVNITCSLKPRQGCFHYSRRNKLILYKFDRRINFHHGHSLNSQVTGLPLGTTLFVCKLACINSDEIQICGAEIFVGVAPEQPQNLSCIQKGEQGTVACTWERGRDTHLYTEYTLQLSGPKNLTWQKQCKDIYCDYLDFGINLTPESPESNFTAKVTAVNSLGSSSSLPSTFTFLD

SEQ ID NO: 123 - protein, 198 aa, Artificial Sequence
  Masking moiety
KIDACKRGDVTVKPSHVILLGSTVNITCSLKPRQGCFHYSRRNKLILYKFDRRINFHHGHSLNSQVTGLPLGTTLFVCKLACINSDEIQICGAEIFVGVAPEQPQNLSCIQKGEQGTVACTWERGRDTHLYTEYTLQLSGPKNLTWQKQCKDIYCDYLDFGINLTPESPESNFTAKVTAVNSLGSSSSLPSTFTFLDI

SEQ ID NO: 124 - protein, 200 aa, Artificial Sequence
  Masking moiety
KIDACKRGDVTVKPSHVILLGSTVNITCSLKPRQGCFHYSRRNKLILYKFDRRINFHHGHSLNSQVTGLPLGTTLFVCKLACINSDEIQICGAEIFVGVAPEQPQNLSCIQKGEQGTVACTWERGRDTHLYTEYTLQLSGPKNLTWQKQCKDIYCDYLDFGINLTPESPESNFTAKVTAVNSLGSSSSLPSTFTFLDIVR

SEQ ID NO: 125 - protein, 201 aa, Artificial Sequence
  Masking moiety
KIDACKRGDVTVKPSHVILLGSTVNITCSLKPRQGCFHYSRRNKLILYKFDRRINFHHGHSLNSQVTGLPLGTTLFVCKLACINSDEIQICGAEIFVGVAPEQPQNLSCIQKGEQGTVACTWERGRDTHLYTEYTLQLSGPKNLTWQKQCKDIYCDYLDFGINLTPESPESNFTAKVTAVNSLGSSSSLPSTFTFLDIVRP

SEQ ID NO: 126 - protein, 202 aa, Artificial Sequence
  Masking moiety
KIDACKRGDVTVKPSHVILLGSTVNITCSLKPRQGCFHYSRRNKLILYKFDRRINFHHGHSLNSQVTGLPLGTTLFVCKLACINSDEIQICGAEIFVGVAPEQPQNLSCIQKGEQGTVACTWERGRDTHLYTEYTLQLSGPKNLTWQKQCKDIYCDYLDFGINLTPESPESNFTAKVTAVNSLGSSSSLPSTFTFLDIVRPL

SEQ ID NO: 127 - protein, 203 aa, Artificial Sequence
  Masking moiety
KIDACKRGDVTVKPSHVILLGSTVNITCSLKPRQGCFHYSRRNKLILYKFDRRINFHHGHSLNSQVTGLPLGTTLFVCKLACINSDEIQICGAEIFVGVAPEQPQNLSCIQKGEQGTVACTWERGRDTHLYTEYTLQLSGPKNLTWQKQCKDIYCDYLDFGINLTPESPESNFTAKVTAVNSLGSSSSLPSTFTFLDIVRPLP

SEQ ID NO: 128 - protein, 204 aa, Artificial Sequence; identical to SEQ ID NO: 11
  Masking moiety

SEQ ID NO: 129 - protein, 205 aa, Artificial Sequence
  Masking moiety
KIDACKRGDVTVKPSHVILLGSTVNITCSLKPRQGCFHYSRRNKLILYKFDRRINFHHGHSLNSQVTGLPLGTTLFVCKLACINSDEIQICGAEIFVGVAPEQPQNLSCIQKGEQGTVACTWERGRDTHLYTEYTLQLSGPKNLTWQKQCKDIYCDYLDFGINLTPESPESNFTAKVTAVNSLGSSSSLPSTFTFLDIVRPLPPW

SEQ ID NO: 130 - protein, 206 aa, Artificial Sequence
  Masking moiety
KIDACKRGDVTVKPSHVILLGSTVNITCSLKPRQGCFHYSRRNKLILYKFDRRINFHHGHSLNSQVTGLPLGTTLFVCKLACINSDEIQICGAEIFVGVAPEQPQNLSCIQKGEQGTVACTWERGRDTHLYTEYTLQLSGPKNLTWQKQCKDIYCDYLDFGINLTPESPESNFTAKVTAVNSLGSSSSLPSTFTFLDIVRPLPPWD

SEQ ID NO: 131 - protein, 207 aa, Artificial Sequence
  Masking moiety
KIDACKRGDVTVKPSHVILLGSTVNITCSLKPRQGCFHYSRRNKLILYKFDRRINFHHGHSLNSQVTGLPLGTTLFVCKLACINSDEIQICGAEIFVGVAPEQPQNLSCIQKGEQGTVACTWERGRDTHLYTEYTLQLSGPKNLTWQKQCKDIYCDYLDFGINLTPESPESNFTAKVTAVNSLGSSSSLPSTFTFLDIVRPLPPWDI

SEQ ID NO: 132 - protein, 208 aa, Artificial Sequence
  Masking moiety
KIDACKRGDVTVKPSHVILLGSTVNITCSLKPRQGCFHYSRRNKLILYKFDRRINFHHGHSLNSQVTGLPLGTTLFVCKLACINSDEIQICGAEIFVGVAPEQPQNLSCIQKGEQGTVACTWERGRDTHLYTEYTLQLSGPKNLTWQKQCKDIYCDYLDFGINLTPESPESNFTAKVTAVNSLGSSSSLPSTFTFLDIVRPLPPWDIR

SEQ ID NO: 133 - protein, 209 aa, Artificial Sequence
  Masking moiety
KIDACKRGDVTVKPSHVILLGSTVNITCSLKPRQGCFHYSRRNKLILYKFDRRINFHHGHSLNSQVTGLPLGTTLFVCKLACINSDEIQICGAEIFVGVAPEQPQNLSCIQKGEQGTVACTWERGRDTHLYTEYTLQLSGPKNLTWQKQCKDIYCDYLDFGINLTPESPESNFTAKVTAVNSLGSSSSLPSTFTFLDIVRPLPPWDIRI

SEQ ID NO: 134 - protein, 210 aa, Artificial Sequence
  Masking moiety
KIDACKRGDVTVKPSHVILLGSTVNITCSLKPRQGCFHYSRRNKLILYKFDRRINFHHGHSLNSQVTGLPLGTTLFVCKLACINSDEIQICGAEIFVGVAPEQPQNLSCIQKGEQGTVACTWERGRDTHLYTEYTLQLSGPKNLTWQKQCKDIYCDYLDFGINLTPESPESNFTAKVTAVNSLGSSSSLPSTFTFLDIVRPLPPWDIRIK

SEQ ID NO: 135 - skipped

SEQ ID NO: 136 - protein, 306 aa, Artificial Sequence; identical to SEQ ID NO: 1
  Cytokine

SEQ ID NO: 137 - protein, 15 aa, Artificial Sequence
  Linker
GGGGSGGGGSGGGGS

SEQ ID NO: 138 - protein, 197 aa, Artificial Sequence; identical to SEQ ID NO: 2
  Cytokine

SEQ ID NO: 139 - protein, 410 aa, Artificial Sequence
  Masking moiety
PSTFTFLDIVRPLPPWDIRIKFQKASVSRCTLYWRDEGLVLLNRLRYRPSNSRLWNMVNVTKAKGRHDLLDLKPFTEYEFQISSKLHLYKGSWSDWSESLRAQTPEEEPTGMLDVWYMKRHIDYSRQQISLFWKNLSVSEARGKILHYQVTLQELTGGKAMTQNITGHTSWTTVIPRTGNWAVAVSAANSKGSSLPTRINIMNLCEAGLLAPRQVSANSEGMDNILVTWQPPRKDPSAVQEYVVEWRELHPGGDTQVPLNWLRSRPYNVSALISENIKSYICYEIRVYALSGDQGGCSSILGNSKHKAPLSGPHINAITEEKGSILISWNSIPVQEQMGCLLHYRIYWKERDSNSQPQLCEIPYRVSQNSHPINSLQPRVTYVLWMTALTAAGESSHGNEREFCLQGKAN

SEQ ID NO: 140 - protein, 759 aa, Artificial Sequence; identical to SEQ ID NO: 39
  Polypeptide chain

SEQ ID NO: 141 - protein, 762 aa, Artificial Sequence; identical to SEQ ID NO: 40
  Polypeptide chain

SEQ ID NO: 142 - protein, 758 aa, Artificial Sequence; identical to SEQ ID NO: 31
  Polypeptide chain

SEQ ID NO: 143 - protein, 449 aa, Artificial Sequence; identical to SEQ ID NO: 30
  Polypeptide chain

SEQ ID NO: 144 - protein, 835 aa, Artificial Sequence; identical to SEQ ID NO: 37
  Polypeptide chain

SEQ ID NO: 145 - protein, 532 aa, Artificial Sequence; identical to SEQ ID NO: 34
  Polypeptide chain

SEQ ID NO: 146 - protein, 435 aa, Artificial Sequence; identical to SEQ ID NO: 33
  Polypeptide chain

SEQ ID NO: 147 - protein, 530 aa, Artificial Sequence; identical to SEQ ID NO: 36
  Polypeptide chain

SEQ ID NO: 148 - protein, 527 aa, Artificial Sequence; identical to SEQ ID NO: 35
  Polypeptide chain

SEQ ID NO: 149 - protein, 425 aa, Artificial Sequence; identical to SEQ ID NO: 32
  Polypeptide chain

SEQ ID NO: 150 - protein, 440 aa, Artificial Sequence; identical to SEQ ID NO: 38
  Polypeptide chain

SEQ ID NO: 151 - protein, 423 aa, Artificial Sequence
  Polypeptide chain
DKTHTCPPCPAPELLGGPSVFLFPPKPKDTLMISRTPEVTCVVVDVSHEDPEVKFNWYVDGVEVHNAKTKPREEQYASTYRVVSVLTVLHQDWLNGKEYKCKVSNKALPAPIEKTISKAKGQPREPQVCTLPPSRDELTKNQVSLSCAVKGFYPSDIAVEWESNGQPENNYKTTPPVLDSDGSFFLVSKLTVDKSRWQQGNVFSCSVMHEALHNHYTQKSLSLSPGGGGGSGGGGSKIDACKRGDVTVKPSHVILLGSTVNITCSLKPRQGCFHYSRRNKLILYKFDRRINFHHGHSLNSQVTGLPLGTTLFVCKLACINSDEIQICGAEIFVGVAPEQPQNLSCIQKGEQGTVACTWERGRDTHLYTEYTLQLSGPKNLTWQKQCKDIYCDYLDFGINLTPESPESNFTAKVTAVNSLGSSS

SEQ ID NO: 152 - protein, 422 aa, Artificial Sequence
  Polypeptide chain
DKTHTCPPCPAPELLGGPSVFLFPPKPKDTLMISRTPEVTCVVVDVSHEDPEVKFNWYVDGVEVHNAKTKPREEQYASTYRVVSVLTVLHQDWLNGKEYKCKVSNKALPAPIEKTISKAKGQPREPQVCTLPPSRDELTKNQVSLSCAVKGFYPSDIAVEWESNGQPENNYKTTPPVLDSDGSFFLVSKLTVDKSRWQQGNVFSCSVMHEALHNHYTQKSLSLSPGGGGGSGGGGSKIDACKRGDVTVKPSHVILLGSTVNITCSLKPRQGCFHYSRRNKLILYKFDRRINFHHGHSLNSQVTGLPLGTTLFVCKLACINSDEIQICGAEIFVGVAPEQPQNLSCIQKGEQGTVACTWERGRDTHLYTEYTLQLSGPKNLTWQKQCKDIYCDYLDFGINLTPESPESNFTAKVTAVNSLGSS

SEQ ID NO: 153 - protein, 426 aa, Artificial Sequence
  Polypeptide chain
DKTHTCPPCPAPELLGGPSVFLFPPKPKDTLMISRTPEVTCVVVDVSHEDPEVKFNWYVDGVEVHNAKTKPREEQYASTYRVVSVLTVLHQDWLNGKEYKCKVSNKALPAPIEKTISKAKGQPREPQVCTLPPSRDELTKNQVSLSCAVKGFYPSDIAVEWESNGQPENNYKTTPPVLDSDGSFFLVSKLTVDKSRWQQGNVFSCSVMHEALHNHYTQKSLSLSPGGGGGSGGGGSKIDACKRGDVTVKPSHVILLGSTVNITCSLKPRQGCFHYSRRNKLILYKFDRRINFHHGHSLNSQVTGLPLGTTLFVCKLACINSDEIQICGAEIFVGVAPEQPQNLSCIQKGEQGTVACTWERGRDTHLYTEYTLQLSGPKNLTWQKQCKDIYCDYLDFGINLTPESPESNFTAKVTAVNSLGSSSSLP

SEQ ID NO: 154 - protein, 427 aa, Artificial Sequence
  Polypeptide chain
DKTHTCPPCPAPELLGGPSVFLFPPKPKDTLMISRTPEVTCVVVDVSHEDPEVKFNWYVDGVEVHNAKTKPREEQYASTYRVVSVLTVLHQDWLNGKEYKCKVSNKALPAPIEKTISKAKGQPREPQVCTLPPSRDELTKNQVSLSCAVKGFYPSDIAVEWESNGQPENNYKTTPPVLDSDGSFFLVSKLTVDKSRWQQGNVFSCSVMHEALHNHYTQKSLSLSPGGGGGSGGGGSKIDACKRGDVTVKPSHVILLGSTVNITCSLKPRQGCFHYSRRNKLILYKFDRRINFHHGHSLNSQVTGLPLGTTLFVCKLACINSDEIQICGAEIFVGVAPEQPQNLSCIQKGEQGTVACTWERGRDTHLYTEYTLQLSGPKNLTWQKQCKDIYCDYLDFGINLTPESPESNFTAKVTAVNSLGSSSSLPS

SEQ ID NO: 155 - protein, 428 aa, Artificial Sequence
  Polypeptide chain
DKTHTCPPCPAPELLGGPSVFLFPPKPKDTLMISRTPEVTCVVVDVSHEDPEVKFNWYVDGVEVHNAKTKPREEQYASTYRVVSVLTVLHQDWLNGKEYKCKVSNKALPAPIEKTISKAKGQPREPQVCTLPPSRDELTKNQVSLSCAVKGFYPSDIAVEWESNGQPENNYKTTPPVLDSDGSFFLVSKLTVDKSRWQQGNVFSCSVMHEALHNHYTQKSLSLSPGGGGGSGGGGSKIDACKRGDVTVKPSHVILLGSTVNITCSLKPRQGCFHYSRRNKLILYKFDRRINFHHGHSLNSQVTGLPLGTTLFVCKLACINSDEIQICGAEIFVGVAPEQPQNLSCIQKGEQGTVACTWERGRDTHLYTEYTLQLSGPKNLTWQKQCKDIYCDYLDFGINLTPESPESNFTAKVTAVNSLGSSSSLPST

SEQ ID NO: 156 - protein, 429 aa, Artificial Sequence
  Polypeptide chain
DKTHTCPPCPAPELLGGPSVFLFPPKPKDTLMISRTPEVTCVVVDVSHEDPEVKFNWYVDGVEVHNAKTKPREEQYASTYRVVSVLTVLHQDWLNGKEYKCKVSNKALPAPIEKTISKAKGQPREPQVCTLPPSRDELTKNQVSLSCAVKGFYPSDIAVEWESNGQPENNYKTTPPVLDSDGSFFLVSKLTVDKSRWQQGNVFSCSVMHEALHNHYTQKSLSLSPGGGGGSGGGGSKIDACKRGDVTVKPSHVILLGSTVNITCSLKPRQGCFHYSRRNKLILYKFDRRINFHHGHSLNSQVTGLPLGTTLFVCKLACINSDEIQICGAEIFVGVAPEQPQNLSCIQKGEQGTVACTWERGRDTHLYTEYTLQLSGPKNLTWQKQCKDIYCDYLDFGINLTPESPESNFTAKVTAVNSLGSSSSLPSTF

SEQ ID NO: 157 - protein, 430 aa, Artificial Sequence
  Polypeptide chain
DKTHTCPPCPAPELLGGPSVFLFPPKPKDTLMISRTPEVTCVVVDVSHEDPEVKFNWYVDGVEVHNAKTKPREEQYASTYRVVSVLTVLHQDWLNGKEYKCKVSNKALPAPIEKTISKAKGQPREPQVCTLPPSRDELTKNQVSLSCAVKGFYPSDIAVEWESNGQPENNYKTTPPVLDSDGSFFLVSKLTVDKSRWQQGNVFSCSVMHEALHNHYTQKSLSLSPGGGGGSGGGGSKIDACKRGDVTVKPSHVILLGSTVNITCSLKPRQGCFHYSRRNKLILYKFDRRINFHHGHSLNSQVTGLPLGTTLFVCKLACINSDEIQICGAEIFVGVAPEQPQNLSCIQKGEQGTVACTWERGRDTHLYTEYTLQLSGPKNLTWQKQCKDIYCDYLDFGINLTPESPESNFTAKVTAVNSLGSSSSLPSTFT

SEQ ID NO: 158 - protein, 431 aa, Artificial Sequence
  Polypeptide chain
DKTHTCPPCPAPELLGGPSVFLFPPKPKDTLMISRTPEVTCVVVDVSHEDPEVKFNWYVDGVEVHNAKTKPREEQYASTYRVVSVLTVLHQDWLNGKEYKCKVSNKALPAPIEKTISKAKGQPREPQVCTLPPSRDELTKNQVSLSCAVKGFYPSDIAVEWESNGQPENNYKTTPPVLDSDGSFFLVSKLTVDKSRWQQGNVFSCSVMHEALHNHYTQKSLSLSPGGGGGSGGGGSKIDACKRGDVTVKPSHVILLGSTVNITCSLKPRQGCFHYSRRNKLILYKFDRRINFHHGHSLNSQVTGLPLGTTLFVCKLACINSDEIQICGAEIFVGVAPEQPQNLSCIQKGEQGTVACTWERGRDTHLYTEYTLQLSGPKNLTWQKQCKDIYCDYLDFGINLTPESPESNFTAKVTAVNSLGSSSSLPSTFTF

SEQ ID NO: 159 - protein, 432 aa, Artificial Sequence
  Polypeptide chain
DKTHTCPPCPAPELLGGPSVFLFPPKPKDTLMISRTPEVTCVVVDVSHEDPEVKFNWYVDGVEVHNAKTKPREEQYASTYRVVSVLTVLHQDWLNGKEYKCKVSNKALPAPIEKTISKAKGQPREPQVCTLPPSRDELTKNQVSLSCAVKGFYPSDIAVEWESNGQPENNYKTTPPVLDSDGSFFLVSKLTVDKSRWQQGNVFSCSVMHEALHNHYTQKSLSLSPGGGGGSGGGGSKIDACKRGDVTVKPSHVILLGSTVNITCSLKPRQGCFHYSRRNKLILYKFDRRINFHHGHSLNSQVTGLPLGTTLFVCKLACINSDEIQICGAEIFVGVAPEQPQNLSCIQKGEQGTVACTWERGRDTHLYTEYTLQLSGPKNLTWQKQCKDIYCDYLDFGINLTPESPESNFTAKVTAVNSLGSSSSLPSTFTFL

SEQ ID NO: 160 - protein, 433 aa, Artificial Sequence
  Polypeptide chain
DKTHTCPPCPAPELLGGPSVFLFPPKPKDTLMISRTPEVTCVVVDVSHEDPEVKFNWYVDGVEVHNAKTKPREEQYASTYRVVSVLTVLHQDWLNGKEYKCKVSNKALPAPIEKTISKAKGQPREPQVCTLPPSRDELTKNQVSLSCAVKGFYPSDIAVEWESNGQPENNYKTTPPVLDSDGSFFLVSKLTVDKSRWQQGNVFSCSVMHEALHNHYTQKSLSLSPGGGGGSGGGGSKIDACKRGDVTVKPSHVILLGSTVNITCSLKPRQGCFHYSRRNKLILYKFDRRINFHHGHSLNSQVTGLPLGTTLFVCKLACINSDEIQICGAEIFVGVAPEQPQNLSCIQKGEQGTVACTWERGRDTHLYTEYTLQLSGPKNLTWQKQCKDIYCDYLDFGINLTPESPESNFTAKVTAVNSLGSSSSLPSTFTFLD

SEQ ID NO: 161 - protein, 434 aa, Artificial Sequence
  Polypeptide chain
DKTHTCPPCPAPELLGGPSVFLFPPKPKDTLMISRTPEVTCVVVDVSHEDPEVKFNWYVDGVEVHNAKTKPREEQYASTYRVVSVLTVLHQDWLNGKEYKCKVSNKALPAPIEKTISKAKGQPREPQVCTLPPSRDELTKNQVSLSCAVKGFYPSDIAVEWESNGQPENNYKTTPPVLDSDGSFFLVSKLTVDKSRWQQGNVFSCSVMHEALHNHYTQKSLSLSPGGGGGSGGGGSKIDACKRGDVTVKPSHVILLGSTVNITCSLKPRQGCFHYSRRNKLILYKFDRRINFHHGHSLNSQVTGLPLGTTLFVCKLACINSDEIQICGAEIFVGVAPEQPQNLSCIQKGEQGTVACTWERGRDTHLYTEYTLQLSGPKNLTWQKQCKDIYCDYLDFGINLTPESPESNFTAKVTAVNSLGSSSSLPSTFTFLDI

SEQ ID NO: 162 - protein, 436 aa, Artificial Sequence
  Polypeptide chain
DKTHTCPPCPAPELLGGPSVFLFPPKPKDTLMISRTPEVTCVVVDVSHEDPEVKFNWYVDGVEVHNAKTKPREEQYASTYRVVSVLTVLHQDWLNGKEYKCKVSNKALPAPIEKTISKAKGQPREPQVCTLPPSRDELTKNQVSLSCAVKGFYPSDIAVEWESNGQPENNYKTTPPVLDSDGSFFLVSKLTVDKSRWQQGNVFSCSVMHEALHNHYTQKSLSLSPGGGGGSGGGGSKIDACKRGDVTVKPSHVILLGSTVNITCSLKPRQGCFHYSRRNKLILYKFDRRINFHHGHSLNSQVTGLPLGTTLFVCKLACINSDEIQICGAEIFVGVAPEQPQNLSCIQKGEQGTVACTWERGRDTHLYTEYTLQLSGPKNLTWQKQCKDIYCDYLDFGINLTPESPESNFTAKVTAVNSLGSSSSLPSTFTFLDIVR

SEQ ID NO: 163 - protein, 437 aa, Artificial Sequence
  Polypeptide chain
DKTHTCPPCPAPELLGGPSVFLFPPKPKDTLMISRTPEVTCVVVDVSHEDPEVKFNWYVDGVEVHNAKTKPREEQYASTYRVVSVLTVLHQDWLNGKEYKCKVSNKALPAPIEKTISKAKGQPREPQVCTLPPSRDELTKNQVSLSCAVKGFYPSDIAVEWESNGQPENNYKTTPPVLDSDGSFFLVSKLTVDKSRWQQGNVFSCSVMHEALHNHYTQKSLSLSPGGGGGSGGGGSKIDACKRGDVTVKPSHVILLGSTVNITCSLKPRQGCFHYSRRNKLILYKFDRRINFHHGHSLNSQVTGLPLGTTLFVCKLACINSDEIQICGAEIFVGVAPEQPQNLSCIQKGEQGTVACTWERGRDTHLYTEYTLQLSGPKNLTWQKQCKDIYCDYLDFGINLTPESPESNFTAKVTAVNSLGSSSSLPSTFTFLDIVRP

SEQ ID NO: 164 - protein, 438 aa, Artificial Sequence
  Polypeptide chain
DKTHTCPPCPAPELLGGPSVFLFPPKPKDTLMISRTPEVTCVVVDVSHEDPEVKFNWYVDGVEVHNAKTKPREEQYASTYRVVSVLTVLHQDWLNGKEYKCKVSNKALPAPIEKTISKAKGQPREPQVCTLPPSRDELTKNQVSLSCAVKGFYPSDIAVEWESNGQPENNYKTTPPVLDSDGSFFLVSKLTVDKSRWQQGNVFSCSVMHEALHNHYTQKSLSLSPGGGGGSGGGGSKIDACKRGDVTVKPSHVILLGSTVNITCSLKPRQGCFHYSRRNKLILYKFDRRINFHHGHSLNSQVTGLPLGTTLFVCKLACINSDEIQICGAEIFVGVAPEQPQNLSCIQKGEQGTVACTWERGRDTHLYTEYTLQLSGPKNLTWQKQCKDIYCDYLDFGINLTPESPESNFTAKVTAVNSLGSSSSLPSTFTFLDIVRPL

SEQ ID NO: 165 - protein, 439 aa, Artificial Sequence
  Polypeptide chain
DKTHTCPPCPAPELLGGPSVFLFPPKPKDTLMISRTPEVTCVVVDVSHEDPEVKFNWYVDGVEVHNAKTKPREEQYASTYRVVSVLTVLHQDWLNGKEYKCKVSNKALPAPIEKTISKAKGQPREPQVCTLPPSRDELTKNQVSLSCAVKGFYPSDIAVEWESNGQPENNYKTTPPVLDSDGSFFLVSKLTVDKSRWQQGNVFSCSVMHEALHNHYTQKSLSLSPGGGGGSGGGGSKIDACKRGDVTVKPSHVILLGSTVNITCSLKPRQGCFHYSRRNKLILYKFDRRINFHHGHSLNSQVTGLPLGTTLFVCKLACINSDEIQICGAEIFVGVAPEQPQNLSCIQKGEQGTVACTWERGRDTHLYTEYTLQLSGPKNLTWQKQCKDIYCDYLDFGINLTPESPESNFTAKVTAVNSLGSSSSLPSTFTFLDIVRPLP

SEQ ID NO: 166 - protein, 441 aa, Artificial Sequence
  Polypeptide chain
DKTHTCPPCPAPELLGGPSVFLFPPKPKDTLMISRTPEVTCVVVDVSHEDPEVKFNWYVDGVEVHNAKTKPREEQYASTYRVVSVLTVLHQDWLNGKEYKCKVSNKALPAPIEKTISKAKGQPREPQVCTLPPSRDELTKNQVSLSCAVKGFYPSDIAVEWESNGQPENNYKTTPPVLDSDGSFFLVSKLTVDKSRWQQGNVFSCSVMHEALHNHYTQKSLSLSPGGGGGSGGGGSKIDACKRGDVTVKPSHVILLGSTVNITCSLKPRQGCFHYSRRNKLILYKFDRRINFHHGHSLNSQVTGLPLGTTLFVCKLACINSDEIQICGAEIFVGVAPEQPQNLSCIQKGEQGTVACTWERGRDTHLYTEYTLQLSGPKNLTWQKQCKDIYCDYLDFGINLTPESPESNFTAKVTAVNSLGSSSSLPSTFTFLDIVRPLPPW

SEQ ID NO: 167 - protein, 442 aa, Artificial Sequence
  Polypeptide chain
DKTHTCPPCPAPELLGGPSVFLFPPKPKDTLMISRTPEVTCVVVDVSHEDPEVKFNWYVDGVEVHNAKTKPREEQYASTYRVVSVLTVLHQDWLNGKEYKCKVSNKALPAPIEKTISKAKGQPREPQVCTLPPSRDELTKNQVSLSCAVKGFYPSDIAVEWESNGQPENNYKTTPPVLDSDGSFFLVSKLTVDKSRWQQGNVFSCSVMHEALHNHYTQKSLSLSPGGGGGSGGGGSKIDACKRGDVTVKPSHVILLGSTVNITCSLKPRQGCFHYSRRNKLILYKFDRRINFHHGHSLNSQVTGLPLGTTLFVCKLACINSDEIQICGAEIFVGVAPEQPQNLSCIQKGEQGTVACTWERGRDTHLYTEYTLQLSGPKNLTWQKQCKDIYCDYLDFGINLTPESPESNFTAKVTAVNSLGSSSSLPSTFTFLDIVRPLPPWD

SEQ ID NO: 168 - protein, 443 aa, Artificial Sequence
  Polypeptide chain
DKTHTCPPCPAPELLGGPSVFLFPPKPKDTLMISRTPEVTCVVVDVSHEDPEVKFNWYVDGVEVHNAKTKPREEQYASTYRVVSVLTVLHQDWLNGKEYKCKVSNKALPAPIEKTISKAKGQPREPQVCTLPPSRDELTKNQVSLSCAVKGFYPSDIAVEWESNGQPENNYKTTPPVLDSDGSFFLVSKLTVDKSRWQQGNVFSCSVMHEALHNHYTQKSLSLSPGGGGGSGGGGSKIDACKRGDVTVKPSHVILLGSTVNITCSLKPRQGCFHYSRRNKLILYKFDRRINFHHGHSLNSQVTGLPLGTTLFVCKLACINSDEIQICGAEIFVGVAPEQPQNLSCIQKGEQGTVACTWERGRDTHLYTEYTLQLSGPKNLTWQKQCKDIYCDYLDFGINLTPESPESNFTAKVTAVNSLGSSSSLPSTFTFLDIVRPLPPWDI

SEQ ID NO: 169 - protein, 444 aa, Artificial Sequence
  Polypeptide chain
DKTHTCPPCPAPELLGGPSVFLFPPKPKDTLMISRTPEVTCVVVDVSHEDPEVKFNWYVDGVEVHNAKTKPREEQYASTYRVVSVLTVLHQDWLNGKEYKCKVSNKALPAPIEKTISKAKGQPREPQVCTLPPSRDELTKNQVSLSCAVKGFYPSDIAVEWESNGQPENNYKTTPPVLDSDGSFFLVSKLTVDKSRWQQGNVFSCSVMHEALHNHYTQKSLSLSPGGGGGSGGGGSKIDACKRGDVTVKPSHVILLGSTVNITCSLKPRQGCFHYSRRNKLILYKFDRRINFHHGHSLNSQVTGLPLGTTLFVCKLACINSDEIQICGAEIFVGVAPEQPQNLSCIQKGEQGTVACTWERGRDTHLYTEYTLQLSGPKNLTWQKQCKDIYCDYLDFGINLTPESPESNFTAKVTAVNSLGSSSSLPSTFTFLDIVRPLPPWDIR

SEQ ID NO: 170 - protein, 445 aa, Artificial Sequence
  Polypeptide chain
DKTHTCPPCPAPELLGGPSVFLFPPKPKDTLMISRTPEVTCVVVDVSHEDPEVKFNWYVDGVEVHNAKTKPREEQYASTYRVVSVLTVLHQDWLNGKEYKCKVSNKALPAPIEKTISKAKGQPREPQVCTLPPSRDELTKNQVSLSCAVKGFYPSDIAVEWESNGQPENNYKTTPPVLDSDGSFFLVSKLTVDKSRWQQGNVFSCSVMHEALHNHYTQKSLSLSPGGGGGSGGGGSKIDACKRGDVTVKPSHVILLGSTVNITCSLKPRQGCFHYSRRNKLILYKFDRRINFHHGHSLNSQVTGLPLGTTLFVCKLACINSDEIQICGAEIFVGVAPEQPQNLSCIQKGEQGTVACTWERGRDTHLYTEYTLQLSGPKNLTWQKQCKDIYCDYLDFGINLTPESPESNFTAKVTAVNSLGSSSSLPSTFTFLDIVRPLPPWDIRI

SEQ ID NO: 171 - protein, 446 aa, Artificial Sequence
  Polypeptide chain
DKTHTCPPCPAPELLGGPSVFLFPPKPKDTLMISRTPEVTCVVVDVSHEDPEVKFNWYVDGVEVHNAKTKPREEQYASTYRVVSVLTVLHQDWLNGKEYKCKVSNKALPAPIEKTISKAKGQPREPQVCTLPPSRDELTKNQVSLSCAVKGFYPSDIAVEWESNGQPENNYKTTPPVLDSDGSFFLVSKLTVDKSRWQQGNVFSCSVMHEALHNHYTQKSLSLSPGGGGGSGGGGSKIDACKRGDVTVKPSHVILLGSTVNITCSLKPRQGCFHYSRRNKLILYKFDRRINFHHGHSLNSQVTGLPLGTTLFVCKLACINSDEIQICGAEIFVGVAPEQPQNLSCIQKGEQGTVACTWERGRDTHLYTEYTLQLSGPKNLTWQKQCKDIYCDYLDFGINLTPESPESNFTAKVTAVNSLGSSSSLPSTFTFLDIVRPLPPWDIRIK

SEQ ID NO: 172 - protein, 10 aa, Artificial Sequence
  GAG-binding domain
KSKREKKDRV

SEQ ID NO: 173 - protein, 328 aa, Artificial Sequence
  Cytokine
MCHQQLVISWFSLVFLASPLVAIWELKKDVYVVELDWYPDAPGEMVVLTCDTPEEDGITWTLDQSSEVLGSGKTLTIQVKEFGDAGQYTCHKGGEVLSHSLLLLHKKEDGIWSTDILKDQKEPKNKTFLRCEAKNYSGRFTCWWLTTISTDLTFSVKSSRGSSDPQGVTCGAATLSAERVRGDNKEYEYSVECQEDSACPAAEESLPIEVMVDAVHKLKYENYTSSFFIRDIIKPDPPKNLQLKPLKNSRQVEVSWEYPDTWSTPHSYFSLTFCVQVQGKSKREKKDRVFTDKTSATVICRKNASISVRAQDRYYSSSWSEWASVPCS

SEQ ID NO: 174 - protein, 219 aa, Artificial Sequence
  Cytokine
MCPARSLLLVATLVLLDHLSLARNLPVATPDPGMFPCLHHSQNLLRAVSNMLQKARQTLEFYPCTSEEIDHEDITKDKTSTVEACLPLELTKNESCLNSRETSFITNGSCLASRKTSFMMALCLSSIYEDLKMYQVEFKTMNAKLLMDPKRQIFLDQNMLAVIDELMQALNFNSETVPQKSSLEEPDFYKTKIKLCILLHAFRIRAVTIDRVMSYLNAS

SEQ ID NO: 175 - protein, 7 aa, Artificial Sequence
  Modified GAG-binding domain
KDNTERV

SEQ ID NO: 176 - protein, 8 aa, Artificial Sequence
  Modified GAG-binding domain
KDNTEGRV

SEQ ID NO: 177 - protein, 662 aa, Artificial Sequence
  Masking moiety
MEPLVTWVVPLLFLFLLSRQGAACRTSECCFQDPPYPDADSGSASGPRDLRCYRISSDRYECSWQYEGPTAGVSHFLRCCLSSGRCCYFAAGSATRLQFSDQAGVSVLYTVTLWVESWARNQTEKSPEVTLQLYNSVKYEPPLGDIKVSKLAGQLRMEWETPDNQVGAEVQFRHRTPSSPWKLGDCGPQDDDTESCLCPLEMNVAQEFQLRRRQLGSQGSSWSKWSSPVCVPPENPPQPQVRFSVEQLGQDGRRRLTLKEQPTQLELPEGCQGLAPGTEVTYRLQLHMLSCPCKAKATRTLHLGKMPYLSGAAYNVAVISSNQFGPGLNQTWHIPADTHTEPVALNISVGTNGTTMYWPARAQSMTYCIEWQPVGQDGGLATCSLTAPQDPDPAGMATYSWSRESGAMGQEKCYYITIFASAHPEKLTLWSTVLSTYHFGGNASAAGTPHHVSVKNHSLDSVSVDWAPSLLSTCPGVLKEYVVRCRDEDSKQVSEHPVQPTETQVTLSGLRAGVAYTVQVRADTAWLRGVWSQPQRFSIEVQVSDWLIFFASLGSFLSILLVGVLGYLGLNRAARHLCPPLPTPCASSAIEFPGGKETWQWINPVDFQEEASLQEALVVEMSWDKGERTEPLEKTELPEGAPELALDTELSLEDGDRCKAKM

SEQ ID NO: 178 - protein, 862 aa, Artificial Sequence
  Masking moiety
MAHTFRGCSLAFMFIITWLLIKAKIDACKRGDVTVKPSHVILLGSTVNITCSLKPRQGCFHYSRRNKLILYKFDRRINFHHGHSLNSQVTGLPLGTTLFVCKLACINSDEIQICGAEIFVGVAPEQPQNLSCIQKGEQGTVACTWERGRDTHLYTEYTLQLSGPKNLTWQKQCKDIYCDYLDFGINLTPESPESNFTAKVTAVNSLGSSSSLPSTFTFLDIVRPLPPWDIRIKFQKASVSRCTLYWRDEGLVLLNRLRYRPSNSRLWNMVNVTKAKGRHDLLDLKPFTEYEFQISSKLHLYKGSWSDWSESLRAQTPEEEPTGMLDVWYMKRHIDYSRQQISLFWKNLSVSEARGKILHYQVTLQELTGGKAMTQNITGHTSWTTVIPRTGNWAVAVSAANSKGSSLPTRINIMNLCEAGLLAPRQVSANSEGMDNILVTWQPPRKDPSAVQEYVVEWRELHPGGDTQVPLNWLRSRPYNVSALISENIKSYICYEIRVYALSGDQGGCSSILGNSKHKAPLSGPHINAITEEKGSILISWNSIPVQEQMGCLLHYRIYWKERDSNSQPQLCEIPYRVSQNSHPINSLQPRVTYVLWMTALTAAGESSHGNEREFCLQGKANWMAFVAPSICIAIIMVGIFSTHYFQQKVFVLLAALRPQWCSREIPDPANSTCAKKYPIAEEKTQLPLDRLLIDWPTPEDPEPLVISEVLHQVTPVFRHPPCSNWPQREKGIQGHQASEKDMMHSASSPPPPRALQAESRQLVDLYKVLESRGSDPKPENPACPWTVLPAGDLPTHDGYLPSNIDDLPSHEAPLADSLEELEPQHISLSVFPSSSLHPLTFSCGDKLTLDQLKMRCDSLML

SEQ ID NO: 179 - protein, 16 aa, Artificial Sequence
  Linker
RSGVPLSLYSGSGGGK

SEQ ID NO: 180 - protein, 14 aa, Artificial Sequence
  Linker
RSGMPYDLYHPSGK

SEQ ID NO: 181 - protein, 14 aa, Artificial Sequence
  Linker
RGPDSGGFMLTSGK

SEQ ID NO: 182 - protein, 15 aa, Artificial Sequence
  Linker
RGSGHEQLTVSGGSK

SEQ ID NO: 183 - protein, 14 aa, Artificial Sequence
  Linker
RSGRAAAVKSPSGK

SEQ ID NO: 184 - protein, 20 aa, Artificial Sequence
  Linker
RGSGISSGLLSGRSDNHSGK

SEQ ID NO: 185 - protein, 14 aa, Artificial Sequence
  Linker
RGDLLAVVAASGGK

SEQ ID NO: 186 - protein, 15 aa, Artificial Sequence
  Linker
RGGISSGLLSGRSGK

SEQ ID NO: 187 - protein, 227 aa, Artificial Sequence
  Polypeptide chain
DKTHTCPPCPAPELLGGPSVFLFPPKPKDTLMISRTPEVTCVVVDVSHEDPEVKFNWYVDGVEVHNAKTKPREEQYASTYRVVSVLTVLHQDWLNGKEYKCKVSNKALPAPIEKTISKAKGQPREPQVCTLPPSRDELTKNQVSLSCAVKGFYPSDIAVEWESNGQPENNYKTTPPVLDSDGSFFLVSKLTVDKSRWQQGNVFSCSVMHEALHNHYTQKSLSLSPGK

SEQ ID NO: 188 - protein, 362 aa, Artificial Sequence
  Polypeptide chain
DKTHTCPPCPAPELLGGPSVFLFPPKPKDTLMISRTPEVTCVVVDVSHEDPEVKFNWYVDGVEVHNAKTKPREEQYASTYRVVSVLTVLHQDWLNGKEYKCKVSNKALPAPIEKTISKAKGQPREPQVYTLPPCRDELTKNQVSLWCLVKGFYPSDIAVEWESNGQPENNYKTTPPVLDSDGSFFLYSKLTVDKSRWQQGNVFSCSVMHEALHNHYTQKSLSLSPGGGSSPPGGGSSGGGSGPSGSPGNWVNVISDLKKIEDLIQSMHIDATLYTESDVHPSCKVTAMKCFLLELQVISLESGDASIHDTVENLIILAQNSLSSNGQVTESGCKECEELEEKNIKEFLQSFVHIVQMFINTS

SEQ ID NO: 189 - protein, 444 aa, Artificial Sequence
  Polypeptide chain
DKTHTCPPCPAPELLGGPSVFLFPPKPKDTLMISRTPEVTCVVVDVSHEDPEVKFNWYVDGVEVHNAKTKPREEQYASTYRVVSVLTVLHQDWLNGKEYKCKVSNKALPAPIEKTISKAKGQPREPQVCTLPPSRDELTKNQVSLSCAVKGFYPSDIAVEWESNGQPENNYKTTPPVLDSDGSFFLVSKLTVDKSRWQQGNVFSCSVMHEALHNHYTQKSLSLSPGPGSGSAVNGTSQFTCFYNSRANISCVWSQDGALQDTSCQVHAWPDRRRWNQTCELLPVSQASWACNLILGAPDSQKLTTVDIVTLRVLCREGVRWRVMAIQDFKPFENLRLMAPISLQVVHVETHRSNISWEISQASHYFERHLEFEARTLSPGHTWEEAPLLTLKQKQEWISLETLTPDTQYEFQVRVKPLQGEFTTWSPWSQPLAFRTKPAALGKD

SEQ ID NO: 190 - protein, 362 aa, Artificial Sequence; identical to SEQ ID NO: 188
  Polypeptide chain

SEQ ID NO: 191 - protein, 444 aa, Artificial Sequence; identical to SEQ ID NO: 189
  Polypeptide chain

SEQ ID NO: 192 - protein, 358 aa, Artificial Sequence
  Polypeptide chain
DKTHTCPPCPAPELLGGPSVFLFPPKPKDTLMISRTPEVTCVVVDVSHEDPEVKFNWYVDGVEVHNAKTKPREEQYASTYRVVSVLTVLHQDWLNGKEYKCKVSNKALPAPIEKTISKAKGQPREPQVYTLPPCRDELTKNQVSLWCLVKGFYPSDIAVEWESNGQPENNYKTTPPVLDSDGSFFLYSKLTVDKSRWQQGNVFSCSVMHEALHNHYTQKSLSLSPGSGSDLLAVVAASSGPGSGNWVNVISDLKKIEDLIQSMHIDATLYTESDVHPSCKVTAMKCFLLELQVISLESGDASIHDTVENLIILAQNSLSSNGQVTESGCKECEELEEKNIKEFLQSFVHIVQMFINTS

SEQ ID NO: 193 - protein, 462 aa, Artificial Sequence
  Polypeptide chain
DKTHTCPPCPAPELLGGPSVFLFPPKPKDTLMISRTPEVTCVVVDVSHEDPEVKFNWYVDGVEVHNAKTKPREEQYASTYRVVSVLTVLHQDWLNGKEYKCKVSNKALPAPIEKTISKAKGQPREPQVCTLPPSRDELTKNQVSLSCAVKGFYPSDIAVEWESNGQPENNYKTTPPVLDSDGSFFLVSKLTVDKSRWQQGNVFSCSVMHEALHNHYTQKSLSLSPGSGSPSGDLLAVVAASSGPGSGSPAVNGTSQFTCFYNSRANISCVWSQDGALQDTSCQVHAWPDRRRWNQTCELLPVSQASWACNLILGAPDSQKLTTVDIVTLRVLCREGVRWRVMAIQDFKPFENLRLMAPISLQVVHVETHRSNISWEISQASHYFERHLEFEARTLSPGHTWEEAPLLTLKQKQEWISLETLTPDTQYEFQVRVKPLQGEFTTWSPWSQPLAFRTKPAALGKD

SEQ ID NO: 194 - protein, 362 aa, Artificial Sequence; identical to SEQ ID NO: 188
  Polypeptide chain

SEQ ID NO: 195 - protein, 444 aa, Artificial Sequence; identical to SEQ ID NO: 189
  Polypeptide chain

SEQ ID NO: 196 - protein, 365 aa, Artificial Sequence
  Polypeptide chain
DKTHTCPPCPAPELLGGPSVFLFPPKPKDTLMISRTPEVTCVVVDVSHEDPEVKFNWYVDGVEVHNAKTKPREEQYASTYRVVSVLTVLHQDWLNGKEYKCKVSNKALPAPIEKTISKAKGQPREPQVYTLPPCRDELTKNQVSLWCLVKGFYPSDIAVEWESNGQPENNYKTTPPVLDSDGSFFLYSKLTVDKSRWQQGNVFSCSVMHEALHNHYTQKSLSLSPGGGSSGGSPISSGLLSGRSSGPGSGSNWVNVISDLKKIEDLIQSMHIDATLYTESDVHPSCKVTAMKCFLLELQVISLESGDASIHDTVENLIILAQNSLSSNGQVTESGCKECEELEEKNIKEFLQSFVHIVQMFINTS

SEQ ID NO: 197 - protein, 461 aa, Artificial Sequence
  Polypeptide chain
DKTHTCPPCPAPELLGGPSVFLFPPKPKDTLMISRTPEVTCVVVDVSHEDPEVKFNWYVDGVEVHNAKTKPREEQYASTYRVVSVLTVLHQDWLNGKEYKCKVSNKALPAPIEKTISKAKGQPREPQVCTLPPSRDELTKNQVSLSCAVKGFYPSDIAVEWESNGQPENNYKTTPPVLDSDGSFFLVSKLTVDKSRWQQGNVFSCSVMHEALHNHYTQKSLSLSPGGPPSGSSPISSGLLSGRSSGGGAVNGTSQFTCFYNSRANISCVWSQDGALQDTSCQVHAWPDRRRWNQTCELLPVSQASWACNLILGAPDSQKLTTVDIVTLRVLCREGVRWRVMAIQDFKPFENLRLMAPISLQVVHVETHRSNISWEISQASHYFERHLEFEARTLSPGHTWEEAPLLTLKQKQEWISLETLTPDTQYEFQVRVKPLQGEFTTWSPWSQPLAFRTKPAALGKD

SEQ ID NO: 198 - protein, 362 aa, Artificial Sequence; identical to SEQ ID NO: 188
  Polypeptide chain

SEQ ID NO: 199 - protein, 313 aa, Mus <mouse, genus>
  Cytokine
MWELEKDVYVVEVDWTPDAPGETVNLTCDTPEEDDITWTSDQRHGVIGSGKTLTITVKEFLDAGQYTCHKGGETLSHSHLLLHKKENGIWSTEILKNFKNKTFLKCEAPNYSGRFTCSWLVQRNMDLKFNIKSSSSSPDSRAVTCGMASLSAEKVTLDQRDYEKYSVSCQEDVTCPTAEETLPIELALEARQQNKYENYSTSFFIRDIIKPDPPKNLQMKPLKNSQVEVSWEYPDSWSTPHSYFSLKFFVRIQRKKEKMKETEEGCNQKGAFLVEKTSTEVQCKGGNVCVQAQDRYYNSSCSKWACVPCRVRS

SEQ ID NO: 200 - protein, 193 aa, Mus <mouse, genus>
  Cytokine
RVIPVSGPARCLSQSRNLLKTTDDMVKTAREKLKHYSCTAEDIDHEDITRDQTSTLKTCLPLELHKNESCLATRETSSTTRGSCLPPQKTSLMMTLCLGSIYEDLKMYQTEFQAINAALQNHNHQQIILDKGMLVAIDELMQSLNHNGETLRQKPPVGEADPYRVKMKLCILLHAFSTRVVTINRVMGYLSSA

SEQ ID NO: 201 - protein, 528 aa, Mus <mouse, genus>
  Masking moiety
LYHPSGPMWELEKDVYVVEVDWTPDAPGETVNLTCDTPEEDDITWTSDQRHGVIGSGKTLTITVKEFLDAGQYTCHKGGETLSHSHLLLHKKENGIWSTEILKNFKNKTFLKCEAPNYSGRFTCSWLVQRNMDLKFNIKSSSSSPDSRAVTCGMASLSAEKVTLDQRDYEKYSVSCQEDVTCPTAEETLPIELALEARQQNKYENYSTSFFIRDIIKPDPPKNLQMKPLKNSQVEVSWEYPDSWSTPHSYFSLKFFVRIQRKKEKMKETEEGCNQKGAFLVEKTSTEVQCKGGNVCVQAQDRYYNSSCSKWACVPCRVRSGGGGSGGGGSGGGGSRVIPVSGPARCLSQSRNLLKTTDDMVKTAREKLKHYSCTAEDIDHEDITRDQTSTLKTCLPLELHKNESCLATRETSSTTRGSCLPPQKTSLMMTLCLGSIYEDLKMYQTEFQAINAALQNHNHQQIILDKGMLVAIDELMQSLNHNGETLRQKPPVGEADPYRVKMKLCILLHAFSTRVVTINRVMGYLSSA

SEQ ID NO: 202 - protein, 546 aa, Artificial Sequence
  Polypeptide chain
DKTHTCPPCPAPELLGGPSVFLFPPKPKDTLMISRTPEVTCVVVDVSHEDPEVKFNWYVDGVEVHNAKTKPREEQYASTYRVVSVLTVLHQDWLNGKEYKCKVSNKALPAPIEKTISKAKGQPREPQVCTLPPSRDELTKNQVSLSCAVKGFYPSDIAVEWESNGQPENNYKTTPPVLDSDGSFFLVSKLTVDKSRWQQGNVFSCSVMHEALHNHYTQKSLSLSPGGGSGGGSGNIDVCKLGTVTVQPAPVIPLGSAANISCSLNPKQGCSHYPSSNELILLKFVNDVLVENLHGKKVHDHTGHSSTFQVTNLSLGMTLFVCKLNCSNSQKKPPVPVCGVEISVGVAPEPPQNISCVQEGENGTVACSWNSGKVTYLKTNYTLQLSGPNNLTCQKQCFSDNRQNCNRLDLGINLSPDLAESRFIVRVTAINDLGNSSSLPHTFTFLDIVIPLPPWDIRINFLNASGSRGTLQWEDEGQVVLNQLRYQPLNSTSWNMVNATNAKGKYDLRDLRPFTEYEFQISSKLHLSGGSWSNWSESLRTRTPEE

SEQ ID NO: 203 - protein, 767 aa, Artificial Sequence
  Polypeptide chain
DKTHTCPPCPAPELLGGPSVFLFPPKPKDTLMISRTPEVTCVVVDVSHEDPEVKFNWYVDGVEVHNAKTKPREEQYASTYRVVSVLTVLHQDWLNGKEYKCKVSNKALPAPIEKTISKAKGQPREPQVYTLPPCRDELTKNQVSLWCLVKGFYPSDIAVEWESNGQPENNYKTTPPVLDSDGSFFLYSKLTVDKSRWQQGNVFSCSVMHEALHNHYTQKSLSLSPGGGSGGSGGSMPYDLYHPSGPMWELEKDVYVVEVDWTPDAPGETVNLTCDTPEEDDITWTSDQRHGVIGSGKTLTITVKEFLDAGQYTCHKGGETLSHSHLLLHKKENGIWSTEILKNFKNKTFLKCEAPNYSGRFTCSWLVQRNMDLKFNIKSSSSSPDSRAVTCGMASLSAEKVTLDQRDYEKYSVSCQEDVTCPTAEETLPIELALEARQQNKYENYSTSFFIRDIIKPDPPKNLQMKPLKNSQVEVSWEYPDSWSTPHSYFSLKFFVRIQRKKEKMKETEEGCNQKGAFLVEKTSTEVQCKGGNVCVQAQDRYYNSSCSKWACVPCRVRSGGGGSGGGGSGGGGSRVIPVSGPARCLSQSRNLLKTTDDMVKTAREKLKHYSCTAEDIDHEDITRDQTSTLKTCLPLELHKNESCLATRETSSTTRGSCLPPQKTSLMMTLCLGSIYEDLKMYQTEFQAINAALQNHNHQQIILDKGMLVAIDELMQSLNHNGETLRQKPPVGEADPYRVKMKLCILLHAFSTRVVTINRVMGYLSSA

SEQ ID NO: 204 - protein, 546 aa, Artificial Sequence; identical to SEQ ID NO: 202
  Polypeptide chain

SEQ ID NO: 205 - protein, 769 aa, Artificial Sequence
  Polypeptide chain
DKTHTCPPCPAPELLGGPSVFLFPPKPKDTLMISRTPEVTCVVVDVSHEDPEVKFNWYVDGVEVHNAKTKPREEQYASTYRVVSVLTVLHQDWLNGKEYKCKVSNKALPAPIEKTISKAKGQPREPQVYTLPPCRDELTKNQVSLWCLVKGFYPSDIAVEWESNGQPENNYKTTPPVLDSDGSFFLYSKLTVDKSRWQQGNVFSCSVMHEALHNHYTQKSLSLSPGGGSGGSGGSISSGLLSGRSSGPMWELEKDVYVVEVDWTPDAPGETVNLTCDTPEEDDITWTSDQRHGVIGSGKTLTITVKEFLDAGQYTCHKGGETLSHSHLLLHKKENGIWSTEILKNFKNKTFLKCEAPNYSGRFTCSWLVQRNMDLKFNIKSSSSSPDSRAVTCGMASLSAEKVTLDQRDYEKYSVSCQEDVTCPTAEETLPIELALEARQQNKYENYSTSFFIRDIIKPDPPKNLQMKPLKNSQVEVSWEYPDSWSTPHSYFSLKFFVRIQRKKEKMKETEEGCNQKGAFLVEKTSTEVQCKGGNVCVQAQDRYYNSSCSKWACVPCRVRSGGGGSGGGGSGGGGSRVIPVSGPARCLSQSRNLLKTTDDMVKTAREKLKHYSCTAEDIDHEDITRDQTSTLKTCLPLELHKNESCLATRETSSTTRGSCLPPQKTSLMMTLCLGSIYEDLKMYQTEFQAINAALQNHNHQQIILDKGMLVAIDELMQSLNHNGETLRQKPPVGEADPYRVKMKLCILLHAFSTRVVTINRVMGYLSSA

SEQ ID NO: 206 - protein, 546 aa, Artificial Sequence; identical to SEQ ID NO: 202
  Polypeptide chain

SEQ ID NO: 207 - protein, 767 aa, Artificial Sequence
  Polypeptide chain
DKTHTCPPCPAPELLGGPSVFLFPPKPKDTLMISRTPEVTCVVVDVSHEDPEVKFNWYVDGVEVHNAKTKPREEQYASTYRVVSVLTVLHQDWLNGKEYKCKVSNKALPAPIEKTISKAKGQPREPQVYTLPPCRDELTKNQVSLWCLVKGFYPSDIAVEWESNGQPENNYKTTPPVLDSDGSFFLYSKLTVDKSRWQQGNVFSCSVMHEALHNHYTQKSLSLSPGGGSGGSGGSRAAAVKSPSGPMWELEKDVYVVEVDWTPDAPGETVNLTCDTPEEDDITWTSDQRHGVIGSGKTLTITVKEFLDAGQYTCHKGGETLSHSHLLLHKKENGIWSTEILKNFKNKTFLKCEAPNYSGRFTCSWLVQRNMDLKFNIKSSSSSPDSRAVTCGMASLSAEKVTLDQRDYEKYSVSCQEDVTCPTAEETLPIELALEARQQNKYENYSTSFFIRDIIKPDPPKNLQMKPLKNSQVEVSWEYPDSWSTPHSYFSLKFFVRIQRKKEKMKETEEGCNQKGAFLVEKTSTEVQCKGGNVCVQAQDRYYNSSCSKWACVPCRVRSGGGGSGGGGSGGGGSRVIPVSGPARCLSQSRNLLKTTDDMVKTAREKLKHYSCTAEDIDHEDITRDQTSTLKTCLPLELHKNESCLATRETSSTTRGSCLPPQKTSLMMTLCLGSIYEDLKMYQTEFQAINAALQNHNHQQIILDKGMLVAIDELMQSLNHNGETLRQKPPVGEADPYRVKMKLCILLHAFSTRVVTINRVMGYLSSA

SEQ ID NO: 208 - protein, 227 aa, Artificial Sequence; identical to SEQ ID NO: 187
  Polypeptide chain

SEQ ID NO: 209 - protein, 767 aa, Artificial Sequence
  Polypeptide chain
DKTHTCPPCPAPELLGGPSVFLFPPKPKDTLMISRTPEVTCVVVDVSHEDPEVKFNWYVDGVEVHNAKTKPREEQYASTYRVVSVLTVLHQDWLNGKEYKCKVSNKALPAPIEKTISKAKGQPREPQVYTLPPCRDELTKNQVSLWCLVKGFYPSDIAVEWESNGQPENNYKTTPPVLDSDGSFFLYSKLTVDKSRWQQGNVFSCSVMHEALHNHYTQKSLSLSPGGGSGGSGGSDSGGFMLTSGPMWELEKDVYVVEVDWTPDAPGETVNLTCDTPEEDDITWTSDQRHGVIGSGKTLTITVKEFLDAGQYTCHKGGETLSHSHLLLHKKENGIWSTEILKNFKNKTFLKCEAPNYSGRFTCSWLVQRNMDLKFNIKSSSSSPDSRAVTCGMASLSAEKVTLDQRDYEKYSVSCQEDVTCPTAEETLPIELALEARQQNKYENYSTSFFIRDIIKPDPPKNLQMKPLKNSQVEVSWEYPDSWSTPHSYFSLKFFVRIQRKKEKMKETEEGCNQKGAFLVEKTSTEVQCKGGNVCVQAQDRYYNSSCSKWACVPCRVRSGGGGSGGGGSGGGGSRVIPVSGPARCLSQSRNLLKTTDDMVKTAREKLKHYSCTAEDIDHEDITRDQTSTLKTCLPLELHKNESCLATRETSSTTRGSCLPPQKTSLMMTLCLGSIYEDLKMYQTEFQAINAALQNHNHQQIILDKGMLVAIDELMQSLNHNGETLRQKPPVGEADPYRVKMKLCILLHAFSTRVVTINRVMGYLSSA

SEQ ID NO: 210 - protein, 8 aa, Artificial Sequence
  Cleavable peptide
VPLSLYSG

SEQ ID NO: 211 - protein, 13 aa, Artificial Sequence
  Cleavable peptide
ISSGLLSGRSDQP

What is claimed is:

1. A masked IL-12 cytokine comprises a protein heterodimer comprising:
a first polypeptide chain comprising:
N′ HL1-L1-MM C′
and a second polypeptide chain comprising:
N′ HL2-L2-C C′
where HL1 is a first half life extension domain, L1 is a first linker, MM is a masking moiety, HL2 is a second half life extension domain, L2 is a second linker, and C is an IL-12 cytokine or functional fragment thereof,
wherein the first extension domain is associated with the second half-life extension domain, and
wherein one of the first linker or the second linker comprises a proteolytically cleavable peptide.

2. The masked cytokine of claim 1, wherein the IL-12 polypeptide or functional fragment thereof comprises an IL-12p40 polypeptide or functional fragment thereof covalently linked to an IL-12p35 polypeptide or functional fragment thereof.

3. The masked cytokine of claim 2, wherein the IL-12p40-IL-12p35 linker is between 5 and 20 amino acids in length.

4. The masked cytokine of claim 2 or 3, wherein the IL-12p40-IL-12p35 linker is rich in amino acid residues G and S.

5. The masked cytokine of any one of claims 2-4, wherein the IL-12p40-IL-12p35 linker comprises SEQ ID NO: 3. (GGGGSGGGGSGGGGS)

6. The masked cytokine of any one of claims 2-5, wherein the IL-12p40 polypeptide comprises SEQ ID NO: 1 or an amino acid sequence having at least one amino acid modification as compared to the amino acid sequence of SEQ ID NO: 1.

7. The masked cytokine of claim 6, wherein IL-12p40 polypeptide comprises SEQ ID NO: 1.

8. The masked cytokine of claim 6, wherein IL-12p40 polypeptide comprises at least one amino acid modification to the GAG-binding domain (KSKREKKDRV) as compared to the amino acid sequence of SEQ ID NO: 1.

9. The masked cytokine of claim 8, wherein IL-12p40 polypeptide comprises SEQ ID NO: 57.

10. The masked cytokine of claim 8, wherein IL-12p40 polypeptide comprises SEQ ID NO: 58.

11. The masked cytokine of any one of claims 6-10, wherein IL-12p40 polypeptide, comprises an amino acid sequence haying one or more cysteine substitution mutations as compared to the amino acid sequence of SEQ ID NO: 1.

12. The masked cytokine of claim 11, wherein IL-12p40 polypeptide comprises SEQ ID NO: 59.

13. The masked cytokine of claim 11, wherein the IL-12p40 polypeptide comprises SEQ ID NO: 60.

14. The masked cytokine of any one of claims 2-13, wherein the IL-12p35 polypeptide comprises SEQ ID NO: 2 or an amino acid sequence haying at least one amino acid modification as compared to the amino acid sequence of SEQ ID NO: 2.

15. The masked cytokine of claim 14, wherein the IL-12p35 polypeptide comprises SEQ ID NO: 2.

16. The masked cytokine of any one of claims 1 to 7, wherein the IL-12 cytokine or functional fragment thereof comprises SEQ ID NO: 4.

17. The masked cytokine of any one of claims 1 to 10, wherein the IL-12 cytokine or functional fragment thereof comprises SEQ ID NO: 61.

18. The masked cytokine of any one of claims 1 to 10, wherein the IL-12 cytokine or functional fragment thereof comprises SEQ ID NO: 62.

19. The masked cytokine of any one of claims 1 to 12, wherein the IL-12 cytokine or functional fragment thereof comprises SEQ ID NO: 63.

20. The masked cytokine of any one of claims 1 to 13, wherein the IL-12 cytokine or functional fragment thereof comprises SEQ ID NO: 64.

21. The masked cytokine of any one of the preceding claims, wherein the masking moiety comprises: an IL-12 cytokine receptor, or a subunit or functional fragment thereof.

22. The masked cytokine of any one of the preceding claims, wherein the masking moiety comprises the extracellular domain of human IL-12Rβ1 or a fragment, portion, or variant thereof that retains or otherwise demonstrates an affinity to IL-12.

23. The masked cytokine of claim 22, wherein the masking moiety comprises residues 24 to 237 of human IL-12Rβ1, namely a sequence having SEQ ID NO: 5.

24. The masked cytokine of claim 22, wherein the masking moiety comprises residues 24 to 545 of human IL-12Rβ1, namely a sequence having SEQ ID NO: 6.

25. The masked cytokine of any one of claims 1-21, wherein the masking moiety comprises the extracellular domain of human IL-12Rβ2 or a fragment, portion, or variant thereof that retains or otherwise demonstrates an affinity to IL-12.

26. The masked cytokine of claim 25, wherein the masking moiety comprises residues 24 to 212 of human IL-12Rβ2, namely a sequence having SEQ ID NO: 7.

27. The masked cytokine of claim 25, wherein the masking moiety comprises residues 24 to 222 of human IL-12Rβ2, namely a sequence having SEQ ID NO: 8 or wherein the masking moiety comprises residues 24 to 227 of human IL-12Rβ2, namely a sequence having SEQ ID NO: 11.

28. The masked cytokine of claim 25, wherein the masking moiety comprises residues 24 to 319 of human IL-12Rβ2, namely a sequence having SEQ ID NO: 9.

29. The masked cytokine of claim 28, wherein the masking moiety comprises at least one amino acid modification as compared to the sequence of SEQ ID NO: 9, optionally wherein said modifications are cysteine substitution mutations.

30. The masked cytokine of claim 29, wherein the masking moiety comprises SEQ ID NO: 65.

31. The masked cytokine of claim 25, wherein the masking moiety comprises residues 24 to 622 of human IL-12Rβ2, namely a sequence having SEQ ID NO: 10.

32. The masked cytokine of any one of the preceding claims, wherein the cleavable, peptide is from 6 to 10 amino acids in length.

33. The masked cytokine of any one of the preceding claims, wherein the cleavable peptide comprises an amino acid sequence of SEQ ID NO: 15.

34. The masked cytokine of any one of the preceding claims, wherein the cleavable peptide comprises an amino acid sequence of SEQ ID NO: 41.

35. The masked cytokine of any one of the preceding claims, wherein the cleavable peptide comprises an amino acid sequence of SEQ ID NO: 42.

36. The masked cytokine of any one of the preceding claims, wherein the cleavable peptide comprises an amino acid sequence of SEQ ID NO: 43.

37. The masked cytokine of any one of the preceding claims, wherein he cleavable peptide comprises an amino acid sequence of SEQ ID NO: 44.

38. The masked cytokine of any one of the preceding claims, wherein the cleavable peptide comprises an amino acid sequence of SEQ ID NO: 45.

39. The masked cytokine of any one of the preceding claims, wherein the first polypeptide chain comprises:
N′ HL1-non-cleavable L1-MM C′
and the second polypeptide chain comprises
N′ HL2-cleavable L2-C C′

40. The masked cytokine of claim 39, wherein the non-cleavable linker is between 3 and 18 amino acids in length.

41. The masked cytokine of claim 39, wherein the non-cleavable linker is between 3 and 15 amino acids in length.

42. The masked cytokine of any one of claims 30 to 41, wherein the non-cleavable linker is rich in amino acid. residues G and S.

43. The masked cytokine of any one of claims 39 to 42, wherein the non-cleavable linker includes [(G)ₙS], where n=4 or 5.

44. The masked cytokine of any one of claims 39 to 43, wherein the non-cleavable linker comprises an amino acid sequence as shown in SEQ ID NO: 12 (GGGGS).

45. The masked cytokine of any one of claims 39 to 43, wherein the non-cleavable linker comprises an amino acid sequence as shown in SEQ ID NO: 13 (GGGGSGGGGS).

46. The masked cytokine of any one of claims 39 to 43, wherein the non-cleavable linker comprises an amino acid sequence as shown in SEQ ID NO: 14 (GGSGGGSGGGGGS).

47. The masked cytokine of any one of claims 39 to 42, wherein the non-cleavable linker comprises an amino acid sequence as shown in SEQ ID NO: 54 (GGSGGSGGSGGSGGSSGP).

48. The masked cytokine of any one of claims 19 to 42, wherein the non-cleavable linker comprises an amino acid sequence as shown in SEQ ID NO: 55 (PGGSGP).

49. The masked cytokine of any one of claims 39 to 42, wherein the non-cleavable linker comprises an amino acid sequence as shown in SEQ ID NO: 56 (GGSPG).

50. The masked cytokine of any one of claims 39 to 49, wherein the cleavable linker comprises a proteolytically cleavable peptide (CP) flanked on both sides by a spacer domain (SD):
SD1-CP-SD2
where SD1 and SD2 are different, such that the first polypeptide chain comprises:
N′ HL1-non-cleavable L1-MM C′
and the second polypeptide chain comprises:
N′ HL2-SD1-CP-SD2-C C′

51. The masked cytokine of claim 50, wherein the first spacer domain (SD1) is between 3 and 10 amino acids in length.

52. The masked cytokine of claim 50 or 51, wherein SD1 comprises SEQ ID NO: 16. (GGSGGS)

53. The masked cytokine of claim 50 or 51, wherein SD1 comprises SEQ ID NO: 17. (GGSGGSGGS)

54. The masked cytokine of any one of claims 50 to 53, wherein the second spacer domain (SD2) is between 3 and 6 amino acids in length.

55. The masked cytokine of any one of claims 50 to 54, wherein SD2 comprises SEQ ID NO: 18. (SGP)

56. The masked IL-2 cytokine of claim 50, wherein the proteolytically cleavable linker comprises SD1-CP-SD2 where SD1 is a first spacer domain, CP is a cleavable peptide and SD2 is a second spacer domain, and wherein CP has an amino acid sequence as shown in SEQ ID NO: 44 and SD2 has an amino acid sequence as shown in SEQ ID NO: 18.

57. The masked IL-2 cytokine of claim 50, wherein the proteolytically cleavable linker comprises SD1-CP-SD2 where SD1 is a first spacer domain, CP is a cleavable peptide and SD2 is a second spacer domain, and wherein CP has an amino acid sequence as shown in SEQ ID NO: 45 and SD2 has an amino acid sequence as shown in SEQ ID NO: 18.

58. The masked cytokine of any one of claims 50 to 54, wherein the cleavable linker comprises SEQ ID NO: 19. (GGSGGSVPLSLYSGP)

59. The masked cytokine of any one of claims 50 to 54, wherein the cleavable linker comprises SEQ ID NO: 20. (GGSGGSGGSVPILSILYSGP)

60. The masked cytokine of claim 50, wherein the cleavable linker comprises SEQ ID NO: 46. (GGSGGSMPYDLYHPSGP)

61. The masked cytokine of claim 50, wherein the cleavable linker comprises SEQ ID NO: 47. (GGSGGSGGSMPYDLYHPSGP)

62. The masked cytokine of claim 50, wherein the cleavable linker comprises SEQ ID NO: 48. (GGSGGSDSGGEMLTSGP)

63. The masked cytokine of claim 50, wherein the cleavable linker comprises SEQ ID NO: 49. (GGSGGSGGSDSGGFMLISGP)

64. The masked cytokine of claim 50, wherein the cleavable linker comprises SEQ ID NO: 50. (GGSGGSRAAAVKSPSGP)

65. The masked cytokine of claim 50, wherein the cleavable linker comprises SEQ ID NO: 51. (GGSGGSGGSRAAAVKSPSGP)

66. The masked cytokine of claim 50, wherein the cleavable linker comprises SEQ ID NO: 52. (GGSGGSISSGILSGRSSGP)

67. The masked cytokine of claim 50, wherein the cleavable linker comprises SEQ ID NO: 53. (GGSGGSGGSISSGLLSGRSSGP)

68. The masked cytokine of any one of the preceding, claims, wherein the first half-life extension domain comprises a first IgG1 Fc domain or a fragment thereof and the second half-life extension domain comprises a second IgG1 Fc domain or a fragment thereof.

69. The masked cytokine of any one of the preceding claims, wherein the first and/or second Fc domains each contain one or more modifications that promote the non-covalent association of the first and the second half-life extension domains.

70. The masked cytokine of any one of the preceding claims, wherein the first half-life extension domain comprises SEQ ID NO: 25 (Y349C; T366S; L38A; Y407V; and N297A) and the second half-life extension domain comprises SEQ ID NO 26 (S354C, T366W and N297A).

71. The masked cytokine of any one of the preceding claims, wherein the first half-life extension domain comprises SEQ ID NO: 27 (Y349C; T366S; L38A; Y407V, N297A and I253A) and the second half-life extension domain comprises SEQ ID NO: 28 (S354C, T366W, N297A and I253A).

72. The masked cytokine of claim 1, wherein the first polypeptide chain comprises an amino acid sequence of SEQ ID NO:34 and a second polypeptide chain comprises an amino acid sequence of SEQ NO: 40.

73. A cleavage product capable of binding to IL-12R, the cleavage product comprising an IL-12 cytokine or functional fragment thereof, preparable by proteolytic cleavage of the cleavable peptide in a masked IL-12 cytokine as defined in any of claims 1-42.

74. A cleavage product of a masked IL-12 cytokine, where the cleavage product is capable of binding to IL-12R, the cleavage product comprising a polypeptide comprising:
PCP-SD2-C
wherein PCP is a portion of a proteolytically cleavable peptide; SD2 is a spacer domain; and C is an IL-12 cytokine or functional fragment thereof.

75. The cleavage product of claim 74, wherein PCP is a portion of a proteolytically cleavable peptide as defined in any of claims 32 to 38.

76. The cleavage product of claim 74 or 75, wherein SD2 is a spacer domain as defined in any of claims 54 to 55.

77. The cleavage product of any one of claims 74 to 76, wherein C is a cytokine or functional fragment thereof as defined in any of claims 2-20.

78. The cleavage product of any one of claims 74 to 77, wherein the cleavage product comprises an amino acid sequence haying about or at least about 85%, 86%, 87%, 88%, 89%, 90%, 91%, 92%, 93%, 94%, 95%, 96%, 97%, 98%, or 99% sequence identity to an amino acid sequence selected from the group consisting of SEQ ID NO: 29.

79. The cleavage product of claim 78, wherein the cleavage product comprises an amino acid sequence of SEQ ID NO: 29.

80. A nucleic acid encoding the masked IL-12 cytokine of any one of claims 1-72 or encoding one of the polypeptide chains of a masked IL-12 cytokine of any one of claims 1 to 72.

81. A vector comprising the nucleic acid of claim 80.

82. A host cell comprising nucleic acid encoding the masked IL-12 cytokine of any one of claims 1 to 72.

83. A composition comprising the masked IL-12 cytokine of any rune of claims 1-72.

84. A pharmaceutical composition comprising the masked IL-12 cytokine of any one of claims 1-72 and a pharmaceutically acceptable carrier.

85. The pharmaceutical composition of claim 84, wherein the pharmaceutical composition is in single unit dosage form.

86. The pharmaceutical composition of claim 84, wherein the pharmaceutical composition is formulated for intravenous administration and is in single unit dosage form.

87. The pharmaceutical composition of claim 84, wherein the pharmaceutical composition is formulated for injection and is in single unit dosage form.

88. The pharmaceutical composition of claim 84, wherein the pharmaceutical composition is a liquid and is in single unit dosage form.

89. A kit comprising the masked IL-12 cytokine of any one of claims 1-41, or the composition of claim 83, or the pharmaceutical composition of claims 84 to 88.

90. A method of producing a masked IL-12 cytokine as defined in any one of claims 1 to 72 comprising culturing the host cell of claim 82 under a condition that produces the masked IL-12 cytokine.

91. A nucleic acid encoding the cleavage product of any one of claims 73 to 79.

92. A composition comprising the cleavage product of any one of claims 73 to 79.

93. A pharmaceutical composition comprising the cleavage product of any one of claims 73 to 79, and a pharmaceutically acceptable carrier.

94. A masked IL-12 cytokine as defined in any one of claims 1 to 72 for use in medicine.

95. A cleavage product as defined in any one of claims 73 to 79 for use in medicine.

96. A method of treating or preventing cancer in a subject, the method comprising administering to the subject an effective amount of a masked IL-12 cytokine according to any one of claims 1 to 72.

97. A method of treating or preventing cancer in a subject, the method comprising administering to the subject an effective amours of a composition according to claim 83 or 92.

98. A method of treating or preventing cancer in a subject, the method comprising administering to the subject an effective amount of a pharmaceutical composition according to any one of claims 84 to 88 and 93.

99. A method of treating or preventing cancer in a subject, the method comprising administering to the subject an effective amount of a masked IL-12 cytokine as defined in any one of claims 1 to 72, whereby the masked cytokine is proteolytically cleaved in vivo to produce a cleavage product as defined in any one of claims 73 to 79.

100. A method of treating or preventing cancer in a subject, the method comprising a step of producing a cleavage product in vivo that is capable of binding to its cognate receptor, where the cleavage product is as defined in any one of claims 73 to 79.

101. A method according to any one of claims 96-100, wherein the cancer is a solid tumor.

102. A masked IL-12 cytokine as defined in any one of claims 1 to 72 for use in treating or preventing cancer.

103. A masked IL-12 cytokine as defined in any one of claims 1 to 72 for use in a method of treating or preventing cancer, the method comprising administering to the subject an effective amount of the masked IL-12 cytokine, whereby the masked cytokine is proteolytically cleaved in vivo to produce a cleavage product as defined in any one of claims 73 to 79.

104. A masked IL-12 cytokine for use according to claim 103, wherein the cancer is a solid tumor.

105. A cleavage product as defined in any one of claims 73 to 79 for use in treating or preventing cancer.

106. A cleavage product as defined in any one of claims 73 to 79 for use in a method of treating or preventing cancer, the method comprising a step of administering a masked cytokine as defined. in any one of claims 1 to 72 to a patient, thereby producing the cleavage product by proteolytic cleavage of the masked cytokine in vivo.

107. A cleavage product as defined in any one of claims 73 to 79 for use in a method of treating or preventing cancer in a subject, the method comprising a step of producing the cleavage product by in viva proteolytic cleavage from a masked cytokine as defined in any one of claims 1 to 72 that has been administered to the subject.

108. A cleavage product for use according to any one of claims 105 to 107, wherein he cancer is a solid tumor.

109. A pharmaceutical composition according to any one of claims 84 to 88 and 93, for use in treating or preventing cancer.

110. A pharmaceutical composition for use according to claim 109, wherein the cancer is a solid tumor.
